(19) United States
(12) Patent Application Publication
(10) Pub. No.: US 2022/0315906 A1
(43) Pub. Date: Oct. 6, 2022

(54) BASE EDITORS WITH DIVERSIFIED TARGETING SCOPE

(71) Applicants: The Broad Institute, Inc., Cambridge, MA (US); President and Fellows of Harvard College, Cambridge, MA (US)

(72) Inventors: David R. Liu, Cambridge, MA (US); Kevin Tianmeng Zhao, Cambridge, MA (US); Tony P. Huang, Cambridge, MA (US)

(73) Assignees: The Broad Institute, Inc., Cambridge, MA (US); President and Fellows of Harvard College, Cambridge, MA (US)

(21) Appl. No.: 17/633,573

(22) PCT Filed: May 20, 2020
(86) PCT No.: PCT/US2020/033883

§ 371 Date: Feb. 7, 2022

Related U.S. Application Data
(60) Provisional application No. 62/884,459, filed on Aug. 8, 2019.

(51) Int. Cl. C12N 9/22; C12N 9/78; C12N 15/11; C12N 15/90; A61K 38/46; A61K 38/50; C12N 15/62

(52) U.S. Cl. CPC C12N 9/22; C12Y 305/04005; C12N 9/78; C12Y 305/04004; C12N 15/11; C12N 15/907; A61K 38/465; A61K 38/50; C12N 15/111; C12N 15/62; C12N 2800/80; C07K 2319/80; C07K 2319/85; C07K 2319/07; C12N 2310/20

(57) ABSTRACT

The present disclosure provides improved adenosine base editors (ABE) that have an expanded range of PAM sequence recognition capability (i.e., recognition of non-canonical ′5-NGG-′3 PAM sequence). In addition, the present disclosure provides improved cytidine base editors (CBE) and adenosine base editors (ABE) comprising circular permutant variants of Cas9 (CP-Cas9) with an increased window of base editing within the protospacer sequence (e.g., from about 4-5 nucleotides to up to about 8-9 nucleotides) and even outside of the protospacer sequence.

### BACKGROUND

[0001] CRISPR-Cas systems, and especially systems based on the Cas9 enzyme from Streptococcus pyogenes (spCas9) have successfully been engineered for genome editing and base editing in a wide range of organisms. Base editing enables the programmable conversion of one base pair to another without making double-stranded DNA breaks,¹⁻⁵ and has already been widely used to install or correct point mutations in a wide range of organisms.^{6,7} Two classes of base editors were developed: cytosine base editors (CBEs) convert CG to TA,⁸⁻¹⁰ while adenine base editors (ABEs) convert A⋅T to G⋅C.^{11,12} Together, CBEs and ABEs enable the installation or correction of all four transition mutations, collectively accounting for ˜63% of pathogenic human point mutations.^{13,14} Because base editors do not make double-stranded DNA breaks, they minimize the formation of editing byproducts such as insertions, deletions, translocations or DNA rearrangements.¹⁵⁻¹⁷

[0002] Since base editors use a catalytically impaired Cas9 to recognize the target DNA site, they canonically require that the target site contain a protospacer adjacent motif (PAM) ˜15±2 nucleotides from the target base. CBE variants that use Cas9 homologs with different PAM requirements increase the likelihood that a target site supports cytosine base editing^{5,10,18,19} In contrast, far fewer ABE variants with distinct PAMs have been described.²⁰⁻²² Thus, while Cas9 can be targeted to virtually any target sequence by providing a suitable guide RNA, Cas9 technology is still limited with respect to the sequences that can be targeted by a strict requirement for a protospacer-adjacent motif (PAM), typically of the nucleotide sequence 5′-NGG-3′ (e.g., for spCas9), that must be present immediately adjacent to the 3′-end of the targeted nucleic acid sequence in order for the Cas9 to bind and act upon the target sequence. The PAM requirement thus limits the sequences that can be efficiently targeted by Cas9. Accordingly, there is a need for nucleic acid programmable DNA binding proteins, such as Cas9, that expand the range of PAM sequence (e.g., variants of 5′-NGG-3′) that may be recognized, in order to expand the scope of genome and base editing.

[0003] In addition, the window of potential base editable positions within the protospacer sequence has limitations. For example, both CBEs and ABEs mutate target base pairs within a small window within the protospacer which is typically a window of about 4-5 bases.

[0004] The width or length of this editing window, together with PAM availability, defines the targeting scope of base editing. In some cases, the target base is located outside of the base-editing window relative to an available PAM. Moreover, for applications, such as mutagenizing a gene, disrupting genes by introducing premature stop codons, or abrogating splice sites or regulatory sequences, a wider editing window is desirable.

[0005] Accordingly, there is a need for nucleic acid programmable DNA binding proteins, such as Cas9, that are improved with regard to both an expanded range of PAM sequence recognition (i.e., recognition of non-canonical 5′-NGG-3′ PAM sequence) and an increased window of base editing within the protospacer sequence and even outside of the protospacer sequence. Such improvements would expand the scope of genome and base editing.

### SUMMARY OF THE INVENTION

[0006] The present disclosure provides improved adenosine base editors (ABE) that have an expanded range of PAM sequence recognition capability (i.e., recognition of non-canonical 5′-NGG-3′ PAM sequence). In addition, the present disclosure provides improved cytidine base editors (CBE) and adenosine base editors (ABE) comprising circular permutant variants of Cas9 (CP-Cas9) with an increased window of base editing within the protospacer sequence (e.g., from about 4-5 nucleotides to up to about 8-9 nucleotides) and even outside of the protospacer sequence. These improved constructs expand the scope of genome and base editing and have surprisingly and/or unexpected characteristics, including higher product purities, expanded editing windows within and outside of the protospacer sequence, and expanded PAM compatibility.

[0007] In some aspects, the disclosure provides a fusion protein of (i) a circularly permuted nucleic acid programmable DNA/RNA binding protein (napDNA/RNAbp); and (ii) a nucleic acid effector domain (e.g., a deaminase).

[0008] For example, in certain embodiments, the disclosure provides various CBE and ABE editors comprising circular permutant Cas9 variants, which are as follows and which are based on CP variants of SEQ ID NO: 1 (the canonical SpCas9). It should be appreciated that CP-Cas9 sequences may be based on Cas9 sequences other than that of SEQ ID NO: 1 and any examples provided herein are not meant to be limiting. Any suitable linker sequence (e.g., GGSGGSGGSGGSGGSGGSGG—SEQ ID NO: 314) may be used to join the Cas9 domains, including those disclosed herein. Nomenclature for these circular permutant variants of Cas9 may be referred to as “CP-Cas9” or “Cas9-CP” variants. The number associated with the “CP” (e.g., CP¹⁰¹²)) refers to the amino acid residue position relative to SEQ ID NO: 1 at which the circular permutant site exists. In other words, the CP site cleaves the peptide bond between residues 1011 and 1012 relative to original SEQ ID NO: 1, whereafter the C-terminal end (beginning with residue 1012) is reordered to because the N-terminal end. Thus, in the CP form of such a Cas9 variant, the N-terminal end is residue 1012 in the original, non-altered SEQ ID NO: 1. For example, for Cas9-CP proteins having above CP sites at original amino acid residue 181, 199, 230, 270, 310, 1010, 1016, 1023, 1029, 1041, 1247, 1249, or 1282 (i.e., which means the cleave site is on the N-terminal side of the residues at those listed positions), one may refer to these variants as Cas9-CP¹⁸¹, Cas9-CP¹⁹⁹, Cas9-CP²³⁰, Cas9-CP²⁷⁰, Cas9-CP³¹⁰, Cas9-CP¹⁰¹⁰, Cas9-CP¹⁰¹⁶, Cas9-CP¹⁰²³, Cas9-CP¹⁰²⁹, Cas9-CP¹⁰⁴¹, Cas9-CP¹²⁴⁷, Cas9-CP¹²⁴⁹, and Cas9-CP¹²⁸², respectively. The following CP variants can be used in connection with the ABE and CBE editors disclosed herein:

Cas9-CP¹⁰¹²
(SEQ ID NO: 295)
DYKVYDVRKMIAKSEQEIGKATAKYFFYSNIMNFFKTEITLANGEIRKRPLIE
TNGETGEIVWDKGRDFATVRKVLSMPQVNIVKKTEVQTGGFSKESILPKRNSDKLIA
RKKDWDPKKYGGFDSPTVAYSVLVVAKVEKGKSKKLKSVKELLGITIMERSSFEKNPI
DFLEAKGYKEVKKDLIIKLPKYSLFELENGRKRMLASAGELQKGNELALPSKYVNFL
YLASHYEKLKGSPEDNEQKQLFVEQHKHYLDEIIEQISEFSKRVILADANLDKVLSAY
NKHRDKPIREQAENIIHLFTLTNLGAPAAFKYFDTTIDRKRYTSTKEVLDATLIHQSITG
LYETRIDLSQLGGDGGSGGSGGSGGSGGSGGSGGDKKYSIGLAIGTNSVGWAVITDE
YKVPSKKFKVLGNTDRHSIKKNLIGALLFDSGETAEATRLKRTARRRYTRRKNRICYL
QEIFSNEMAKVDDSFFHRLEESFLVEEDKKHERHPIFGNIVDEVAYHEKYPTIYHLRK
KLVDSTDKADLRLIYLALAHMIKFRGHFLIEGDLNPDNSDVDKLFIQLVQTYNQLFEE
NPINASGVDAKAILSARLSKSRRLENLIAQLPGEKKNGLFGNLIALSLGLTPNFKSNFD
LAEDAKLQLSKDTYDDDLDNLLAQIGDQYADLFLAAKNLSDAILLSDILRVNTEITKA
PLSASMIKRYDEHHQDLTLLKALVRQQLPEKYKEIFFDQSKNGYAGYIDGGASQEEFY
KFIKPILEKMDGTEELLVKLNREDLLRKQRTFDNGSIPHQIHLGELHAILRRQEDFYPF
LKDNREKIEKILTFRIPYYVGPLARGNSRFAWMTRKSEETITPWNFEEVVDKGASAQS
FIERMTNFDKNLPNEKVLPKHSLLYEYFTVYNELTKVKYVTEGMRKPAFLSGEQKKA
IVDLLFKTNRKVTVKQLKEDYFKKIECFDSVEISGVEDRFNASLGTYHDLLKIIKDKD
FLDNEENEDILEDIVLTLTLFEDREMIEERLKTYAHLFDDKVMKQLKRRRYTGWGRLS
RKLINGIRDKQSGKTILDFLKSDGFANRNFMQLIHDDSLTFKEDIQKAQVSGQGDSLH
EHIANLAGSPAIKKGILQTVKVVDELVKVMGRHKPENIVIEMARENQTTQKGQKNSR
ERMKRIEEGIKELGSQILKEHPVENTQLQNEKLYLYYLQNGRDMYVDQELDINRLSD
YDVDHIVPQSFLKDDSIDNKVLTRSDKNRGKSDNVPSEEVVKKMKNYWRQLLNAKL
ITQRKFDNLTKAERGGLSELDKAGFIKRQLVETRQITKHVAQILDSRMNTKYDENDKL
IREVKVITLKSKLVSDFRKDFQFYKVREINNYHHAHDAYLNAVVGTALIKKYPKLESE
FVYG.
Cas9-CP¹⁰²⁸
(SEQ ID NO: 296)
EIGKATAKYFFYSNIMNFFKTEITLANGEIRKRPLIETNGETGEIVWDKGRDFA
TVRKVLSMPQVNIVKKTEVQTGGFSKESILPKRNSDKLIARKKDWDPKKYGGFDSPT
VAYSVLVVAKVEKGKSKKLKSVKELLGITIMERSSFEKNPIDFLEAKGYKEVKKDLIIK
LPKYSLFELENGRKRMLASAGELQKGNELALPSKYVNFLYLASHYEKLKGSPEDNEQ
KQLFVEQHKHYLDEIIEQISEFSKRVILADANLDKVLSAYNKHRDKPIREQAENIIHLF
TLTNLGAPAAFKYFDTTIDRKRYTSTKEVLDATLIHQSITGLYETRIDLSQLGGDGGSG
GSGGSGGSGGSGGSGGMDKKYSIGLAIGTNSVGWAVITDEYKVPSKKFKVLGNTDR
HSIKKNLIGALLFDSGETAEATRLKRTARRRYTRRKNRICYLQEIFSNEMAKVDDSFFH
RLEESFLVEEDKKHERHPIFGNIVDEVAYHEKYPTIYHLRKKLVDSTDKADLRLIYLAL
AHMIKFRGHFLIEGDLNPDNSDVDKLFIQLVQTYNQLFEENPINASGVDAKAILSARL
SKSRRLENLIAQLPGEKKNGLFGNLIALSLGLTPNFKSNFDLAEDAKLQLSKDTYDDD
LDNLLAQIGDQYADLFLAAKNLSDAILLSDILRVNTEITKAPLSASMIKRYDEHHQDLT
LLKALVRQQLPEKYKEIFFDQSKNGYAGYIDGGASQEEFYKFIKPILEKMDGTEELLV
KLNREDLLRKQRTFDNGSIPHQIHLGELHAILRRQEDFYPFLKDNREKIEKILTFRIPYY
VGPLARGNSRFAWMTRKSEETITPWNFEEVVDKGASAQSFIERMTNFDKNLPNEKVL
PKHSLLYEYFTVYNELTKVKYVTEGMRKPAFLSGEQKKAIVDLLFKTNRKVTVKQLK
EDYFKKIECFDSVEISGVEDRFNASLGTYHDLLKIIKDKDFLDNEENEDILEDIVLTLTL
FEDREMIEERLKTYAHLFDDKVMKQLKRRRYTGWGRLSRKLINGIRDKQSGKTILDF
LKSDGFANRNFMQLIHDDSLTFKEDIQKAQVSGQGDSLHEHIANLAGSPAIKKGILQT
VKVVDELVKVMGRHKPENIVIEMARENQTTQKGQKNSRERMKRIEEGIKELGSQILK
EHPVENTQLQNEKLYLYYLQNGRDMYVDQELDINRLSDYDVDHIVPQSFLKDDSIDN
KVLTRSDKNRGKSDNVPSEEVVKKMKNYWRQLLNAKLITQRKFDNLTKAERGGLSE
LDKAGFIKRQLVETRQITKHVAQILDSRMNTKYDENDKLIREVKVITLKSKLVSDFRK
DFQFYKVREINNYHHAHDAYLNAVVGTALIKKYPKLESEFVYGDYKVYDVRKMIAKSEQ.
Cas9-CP¹⁰⁴¹
(SEQ ID NO: 297)
NIMNFFKTEITLANGEIRKRPLIETNGETGEIVWDKGRDFATVRKVLSMPQVN
IVKKTEVQTGGFSKESILPKRNSDKLIARKKDWDPKKYGGFDSPTVAYSVLVVAKVE
KGKSKKLKSVKELLGITIMERSSFEKNPIDFLEAKGYKEVKKDLIIKLPKYSLFELENG
RKRMLASAGELQKGNELALPSKYVNFLYLASHYEKLKGSPEDNEQKQLFVEQHKHY
LDEIIEQISEFSKRVILADANLDKVLSAYNKHRDKPIREQAENIIHLFTLTNLGAPAAFK
YFDTTIDRKRYTSTKEVLDATLIHQSITGLYETRIDLSQLGGDGGSGGSGGSGGSGGSG
GSGGDKKYSIGLAIGTNSVGWAVITDEYKVPSKKFKVLGNTDRHSIKKNLIGALLFDS
GETAEATRLKRTARRRYTRRKNRICYLQEIFSNEMAKVDDSFFHRLEESFLVEEDKKH
ERHPIFGNIVDEVAYHEKYPTIYHLRKKLVDSTDKADLRLIYLALAHMIKFRGHFLIEG
DLNPDNSDVDKLFIQLVQTYNQLFEENPINASGVDAKAILSARLSKSRRLENLIAQLP
GEKKNGLFGNLIALSLGLTPNFKSNFDLAEDAKLQLSKDTYDDDLDNLLAQIGDQYA
DLFLAAKNLSDAILLSDILRVNTEITKAPLSASMIKRYDEHHQDLTLLKALVRQQLPEK
YKEIFFDQSKNGYAGYIDGGASQEEFYKFIKPILEKMDGTEELLVKLNREDLLRKQRT
FDNGSIPHQIHLGELHAILRRQEDFYPFLKDNREKIEKILTFRIPYYVGPLARGNSRFAW
MTRKSEETITPWNFEEVVDKGASAQSFIERMTNFDKNLPNEKVLPKHSLLYEYFTVY
NELTKVKYVTEGMRKPAFLSGEQKKAIVDLLFKTNRKVTVKQLKEDYFKKIECFDSV
EISGVEDRFNASLGTYHDLLKIIKDKDFLDNEENEDILEDIVLTLTLFEDREMIEERLKT
YAHLFDDKVMKQLKRRRYTGWGRLSRKLINGIRDKQSGKTILDFLKSDGFANRNFM
QLIHDDSLTFKEDIQKAQVSGQGDSLHEHIANLAGSPAIKKGILQTVKVVDELVKVMG
RHKPENIVIEMARENQTTQKGQKNSRERMKRIEEGIKELGSQILKEHPVENTQLQNEK
LYLYYLQNGRDMYVDQELDINRLSDYDVDHIVPQSFLKDDSIDNKVLTRSDKNRGKS
DNVPSEEVVKKMKNYWRQLLNAKLITQRKFDNLTKAERGGLSELDKAGFIKRQLVE
TRQITKHVAQILDSRMNTKYDENDKLIREVKVITLKSKLVSDFRKDFQFYKVREINNY
HHAHDAYLNAVVGTALIKKYPKLESEFVYGDYKVYDVRKMIAKSEQEIGKATAKYFFYS.
Cas9-CP¹²⁴⁹
(SEQ ID NO: 298)
PEDNEQKQLFVEQHKHYLDEIIEQISEFSKRVILADANLDKVLSAYNKHRDKP
IREQAENIIHLFTLTNLGAPAAFKYFDTTIDRKRYTSTKEVLDATLIHQSITGLYETRIDL
SQLGGDGGSGGSGGSGGSGGSGGSGGMDKKYSIGLAIGTNSVGWAVITDEYKVPSK
KFKVLGNTDRHSIKKNLIGALLFDSGETAEATRLKRTARRRYTRRKNRICYLQEIFSNE
MAKVDDSFFHRLEESFLVEEDKKHERHPIFGNIVDEVAYHEKYPTIYHLRKKLVDSTD
KADLRLIYLALAHMIKFRGHFLIEGDLNPDNSDVDKLFIQLVQTYNQLFEENPINASG
VDAKAILSARLSKSRRLENLIAQLPGEKKNGLFGNLIALSLGLTPNFKSNFDLAEDAK
LQLSKDTYDDDLDNLLAQIGDQYADLFLAAKNLSDAILLSDILRVNTEITKAPLSASM
IKRYDEHHQDLTLLKALVRQQLPEKYKEIFFDQSKNGYAGYIDGGASQEEFYKFIKPIL
EKMDGTEELLVKLNREDLLRKQRTFDNGSIPHQIHLGELHAILRRQEDFYPFLKDNRE
KIEKILTFRIPYYVGPLARGNSRFAWMTRKSEETITPWNFEEVVDKGASAQSFIERMT
NFDKNLPNEKVLPKHSLLYEYFTVYNELTKVKYVTEGMRKPAFLSGEQKKAIVDLLF
KTNRKVTVKQLKEDYFKKIECFDSVEISGVEDRFNASLGTYHDLLKIIKDKDFLDNEE
NEDILEDIVLTLTLFEDREMIEERLKTYAHLFDDKVMKQLKRRRYTGWGRLSRKLING
IRDKQSGKTILDFLKSDGFANRNFMQLIHDDSLTFKEDIQKAQVSGQGDSLHEHIANL
AGSPAIKKGILQTVKVVDELVKVMGRHKPENIVIEMARENQTTQKGQKNSRERMKRI
EEGIKELGSQILKEHPVENTQLQNEKLYLYYLQNGRDMYVDQELDINRLSDYDVDHI
VPQSFLKDDSIDNKVLTRSDKNRGKSDNVPSEEVVKKMKNYWRQLLNAKLITQRKF
DNLTKAERGGLSELDKAGFIKRQLVETRQITKHVAQILDSRMNTKYDENDKLIREVK
VITLKSKLVSDFRKDFQFYKVREINNYHHAHDAYLNAVVGTALIKKYPKLESEFVYG
DYKVYDVRKMIAKSEQEIGKATAKYFFYSNIMNFFKTEITLANGEIRKRPLIETNGET
GEIVWDKGRDFATVRKVLSMPQVNIVKKTEVQTGGFSKESILPKRNSDKLIARKKDW
DPKKYGGFDSPTVAYSVLVVAKVEKGKSKKLKSVKELLGITIMERSSFEKNPIDFLEA
KGYKEVKKDLIIKLPKYSLFELENGRKRMLASAGELQKGNELALPSKYVNFLYLASH
YEKLKGS.
Cas9-CP¹³⁰⁰
(SEQ ID NO: 299)
KPIREQAENIIHLFTLTNLGAPAAFKYFDTTIDRKRYTSTKEVLDATLIHQSITG
LYETRIDLSQLGGDGGSGGSGGSGGSGGSGGSGGDKKYSIGLAIGTNSVGWAVITDE
YKVPSKKFKVLGNTDRHSIKKNLIGALLFDSGETAEATRLKRTARRRYTRRKNRICYL
QEIFSNEMAKVDDSFFHRLEESFLVEEDKKHERHPIFGNIVDEVAYHEKYPTIYHLRK
KLVDSTDKADLRLIYLALAHMIKFRGHFLIEGDLNPDNSDVDKLFIQLVQTYNQLFEE
NPINASGVDAKAILSARLSKSRRLENLIAQLPGEKKNGLFGNLIALSLGLTPNFKSNFD
LAEDAKLQLSKDTYDDDLDNLLAQIGDQYADLFLAAKNLSDAILLSDILRVNTEITKA
PLSASMIKRYDEHHQDLTLLKALVRQQLPEKYKEIFFDQSKNGYAGYIDGGASQEEFY
KFIKPILEKMDGTEELLVKLNREDLLRKQRTFDNGSIPHQIHLGELHAILRRQEDFYPF
LKDNREKIEKILTFRIPYYVGPLARGNSRFAWMTRKSEETITPWNFEEVVDKGASAQS
FIERMTNFDKNLPNEKVLPKHSLLYEYFTVYNELTKVKYVTEGMRKPAFLSGEQKKA
IVDLLFKTNRKVTVKQLKEDYFKKIECFDSVEISGVEDRFNASLGTYHDLLKIIKDKD
FLDNEENEDILEDIVLTLTLFEDREMIEERLKTYAHLFDDKVMKQLKRRRYTGWGRLS
RKLINGIRDKQSGKTILDFLKSDGFANRNFMQLIHDDSLTFKEDIQKAQVSGQGDSLH
EHIANLAGSPAIKKGILQTVKVVDELVKVMGRHKPENIVIEMARENQTTQKGQKNSR
ERMKRIEEGIKELGSQILKEHPVENTQLQNEKLYLYYLQNGRDMYVDQELDINRLSD
YDVDHIVPQSFLKDDSIDNKVLTRSDKNRGKSDNVPSEEVVKKMKNYWRQLLNAKL
ITQRKFDNLTKAERGGLSELDKAGFIKRQLVETRQITKHVAQILDSRMNTKYDENDKL
IREVKVITLKSKLVSDFRKDFQFYKVREINNYHHAHDAYLNAVVGTALIKKYPKLESE
FVYGDYKVYDVRKMIAKSEQEIGKATAKYFFYSNIMNFFKTEITLANGEIRKRPLIET
NGETGEIVWDKGRDFATVRKVLSMPQVNIVKKTEVQTGGFSKESILPKRNSDKLIAR
KKDWDPKKYGGFDSPTVAYSVLVVAKVEKGKSKKLKSVKELLGITIMERSSFEKNPI
DFLEAKGYKEVKKDLIIKLPKYSLFELENGRKRMLASAGELQKGNELALPSKYVNFL
YLASHYEKLKGSPEDNEQKQLFVEQHKHYLDEIIEQISEFSKRVILADANLDKVLSAY
NKHRD.

[0009] Exemplary C-terminal fragments of Cas9, based on the Cas9 of SEQ ID NO: 1, which may be rearranged as a new N-terminus of Cas9, are provided below. It should be appreciated that such C-terminal fragments of Cas9 are exemplary and are not meant to be limiting.

CP¹⁰¹² (i.e., the new C-terminus portion of
Cas9-CP¹⁰¹²)
(SEQ ID NO: 300)
DYKVYDVRKMIAKSEQEIGKATAKYFFYSNIMNFFKTEITLANGEIRKRP
LIETNGETGEIVWDKGRDFATVRKVLSMPQVNIVKKTEVQTGGFSKESIL
PKRNSDKLIARKKDWDPKKYGGFDSPTVAYSVLVVAKVEKGKSKKLKSVK
ELLGITIMERSSFEKNPIDFLEAKGYKEVKKDLIIKLPKYSLFELENGRK
RMLASAGELQKGNELALPSKYVNFLYLASHYEKLKGSPEDNEQKQLFVEQ
HKHYLDEIIEQISEFSKRVILADANLDKVLSAYNKHRDKPIREQAENIIH
LFTLTNLGAPAAFKYFDTTIDRKRYTSTKEVLDATLIHQSITGLYETRID
LSQLGGD.
CP¹⁰²⁸ (i.e., the new C-terminus portion of
Cas9-CP¹⁰²⁸)
(SEQ ID NO: 301)
EIGKATAKYFFYSNIMNFFKTEITLANGEIRKRPLIETNGETGEIVWDKG
RDFATVRKVLSMPQVNIVKKTEVQTGGFSKESILPKRNSDKLIARKKDWD
PKKYGGFDSPTVAYSVLVVAKVEKGKSKKLKSVKELLGITIMERSSFEKN
PIDFLEAKGYKEVKKDLIIKLPKYSLFELENGRKRMLASAGELQKGNELA
LPSKYVNFLYLASHYEKLKGSPEDNEQKQLFVEQHKHYLDEIIEQISEFS
KRVILADANLDKVLSAYNKHRDKPIREQAENIIHLFTLTNLGAPAAFKYF
DTTIDRKRYTSTKEVLDATLIHQSITGLYETRIDLSQLGGD.
CP¹⁰⁴¹ (i.e., the new C-terminus portion of
Cas9-CP¹⁰⁴¹)
(SEQ ID NO: 302)
NIMNFFKTEITLANGEIRKRPLIETNGETGEIVWDKGRDFATVRKVLSMP
QVNIVKKTEVQTGGFSKESILPKRNSDKLIARKKDWDPKKYGGFDSPTVA
YSVLVVAKVEKGKSKKLKSVKELLGITIMERSSFEKNPIDFLEAKGYKEV
KKDLIIKLPKYSLFELENGRKRMLASAGELQKGNELALPSKYVNFLYLAS
HYEKLKGSPEDNEQKQLFVEQHKHYLDEIIEQISEFSKRVILADANLDKV
LSAYNKHRDKPIREQAENIIHLFTLTNLGAPAAFKYFDTTIDRKRYTSTK
EVLDATLIHQSITGLYETRIDLSQLGGD.
CP¹²⁴⁹ (i.e., the new C-terminus portion of
Cas9-CP¹²⁴⁹)
(SEQ ID NO: 303)
PEDNEQKQLFVEQHKHYLDEIIEQISEFSKRVILADANLDKVLSAYNKHR
DKPIREQAENIIHLFTLTNLGAPAAFKYFDTTIDRKRYTSTKEVLDATLI
HQSITGLYETRIDLSQLGGD.
CP¹³⁰⁰ (i.e., the new C-terminus portion of
Cas9-CP¹³⁰⁰
(SEQ ID NO: 304)
KPIREQAENIIHLFTLTNLGAPAAFKYFDTTIDRKRYTSTKEVLDATLIH
QSITGLYETRIDLSQLGGD.

[0010] In some embodiments, the circularly permuted napDNA/RNAbp is a nuclease, a nickase, or is nuclease inactive.

[0011] The present disclosure also provides base editor fusion proteins comprising (a) an improved Cas9 domain having modified PAM specificity and/or an expanded editing window, and (b) a deaminase, e.g., an adenosine deaminase or a cytidine deaminase.

[0012] In various embodiments, the Cas9 domains and the deaminase domains may be joined by a linker.

[0013] In various embodiments, the fusion proteins may have, but are not limited to, the following structures: N-terminus-[Cas9 domain]-[linker]-[deaminase domain]-C-terminus; N-terminus-[deaminase domain]-[linker]-[Cas9 domain].

[0014] In various embodiments, the ABE or CBE fusions have the following amino acid sequences:

VRQR-ABEmax (SEQ ID NO: 66)
(SEQ ID NO: 66)
MKRTADGSEFESPKKKRKVSEVEFSHEYWMRHALTLAKRAWDEREVPVGA
VLVHNNRVIGEGWNRPIGRHDPTAHAEIMALRQGGLVMQNYRLIDATLYV
TLEPCVMCAGAMIHSRIGRVVFGARDAKTGAAGSLMDVLHHPGMNHRVEI
TEGILADECAALLSDFFRMRRQEIKAQKKAQSSTDSGGSSGGSSGSETPG
TSESATPESSGGSSGGSSEVEFSHEYWMRHALTLAKRARDEREVPVGAVL
VLNNRVIGEGWNRAIGLHDPTAHAEIMALRQGGLVMQNYRLIDATLYVTF
EPCVMCAGAMIHSRIGRVVFGVRNAKTGAAGSLMDVLHYPGMNHRVEITE
GILADECAALLCYFFRMPRQVFNAQKKAQSSTDSGGSSGGSSGSETPGTS
ESATPESSGGSSGGSDKKYSIGLAIGTNSVGWAVITDEYKVPSKKFKVLG
NTDRHSIKKNLIGALLFDSGETAEATRLKRTARRRYTRRKNRICYLQEIF
SNEMAKVDDSFFHRLEESFLVEEDKKHERHPIFGNIVDEVAYHEKYPTIY
HLRKKLVDSTDKADLRLIYLALAHMIKFRGHFLIEGDLNPDNSDVDKLFI
QLVQTYNQLFEENPINASGVDAKAILSARLSKSRRLENLIAQLPGEKKNG
LFGNLIALSLGLTPNFKSNFDLAEDAKLQLSKDTYDDDLDNLLAQIGDQY
ADLFLAAKNLSDAILLSDILRVNTEITKAPLSASMIKRYDEHHQDLTLLK
ALVRQQLPEKYKEIFFDQSKNGYAGYIDGGASQEEFYKFIKPILEKMDGT
EELLVKLNREDLLRKQRTFDNGSIPHQIHLGELHAILRRQEDFYPFLKDN
REKIEKILTFRIPYYVGPLARGNSRFAWMTRKSEETITPWNFEEVVDKGA
SAQSFIERMTNFDKNLPNEKVLPKHSLLYEYFTVYNELTKVKYVTEGMRK
PAFLSGEQKKAIVDLLFKTNRKVTVKQLKEDYFKKIECFDSVEISGVEDR
FNASLGTYHDLLKIIKDKDFLDNEENEDILEDIVLTLTLFEDREMIEERL
KTYAHLFDDKVMKQLKRRRYTGWGRLSRKLINGIRDKQSGKTILDFLKSD
GFANRNFMQLIHDDSLTFKEDIQKAQVSGQGDSLHEHIANLAGSPAIKKG
ILQTVKVVDELVKVMGRHKPENIVIEMARENQTTQKGQKNSRERMKRIEE
GIKELGSQILKEHPVENTQLQNEKLYLYYLQNGRDMYVDQELDINRLSDY
DVDHIVPQSFLKDDSIDNKVLTRSDKNRGKSDNVPSEEVVKKMKNYWRQL
LNAKLITQRKFDNLTKAERGGLSELDKAGFIKRQLVETRQITKHVAQILD
SRMNTKYDENDKLIREVKVITLKSKLVSDFRKDFQFYKVREINNYHHAHD
AYLNAVVGTALIKKYPKLESEFVYGDYKVYDVRKMIAKSEQEIGKATAKY
FFYSNIMNFFKTEITLANGEIRKRPLIETNGETGEIVWDKGRDFATVRKV
LSMPQVNIVKKTEVQTGGFSKESILPKRNSDKLIARKKDWDPKKYGGFVS
PTVAYSVLVVAKVEKGKSKKLKSVKELLGITIMERSSFEKNPIDFLEAKG
YKEVKKDLIIKLPKYSLFELENGRKRMLASARELQKGNELALPSKYVNFL
YLASHYEKLKGSPEDNEQKQLFVEQHKHYLDEIIEQISEFSKRVILADAN
LDKVLSAYNKHRDKPIREQAENIIHLFTLTNLGAPAAFKYFDTTIDRKQY
RSTKEVLDATLIHQSITGLYETRIDLSQLGGDSGGSKRTADGSEFEPKKK
RKV.

[0015] VRQR-ABEmax may also be referred to as “ABEmax (7.10)” and has the following structure: NLS_ecTadA_{(wild-type)}-(SGGS)₂-XTEN-(SGGS)₂-ecTadA7.10_{(w23R_H36L_P48A_R51L_L84F_A106V_D108N_H123Y_S146C_D147Y_R152P_E155V_I156F_K157N)}-(SGGS)₂-XTEN-(SGGS)₂_nCas9_VRQR_SGGS_NLS. These structural features of VRQR-ABEmax may be shown in SEQ ID NO: 66, as follows:

(SEQ ID NO: 66)
MKRTADGSEFESPKKKRKVSEVEFSHEYWMRHALTLAKRAWDEREVPVGAVLVH
NNRVIGEGWNRPIGRHDPTAHAEIMALRQGGLVMQNYRLIDATLYVTLEPCVM
CAGAMIHSRIGRVVFGARDAKTGAAGSLMDVLHHPGMNHRVEITEGILADECA
ALLSDFFRMRRQEIKAQKKAQSSTDSGGSSGGSSGSETPGTSESATPESSGGSSGGSS
EVEFSHEYWMRHALTLAKRARDEREVPVGAVLVLNNRVIGEGWNRAIGLHDPT
AHAEIMALRQGGLVMQNYRLIDATLYVTFEPCVMCAGAMIHSRIGRVVFGVRN
AKTGAAGSLMDVLHYPGMNHRVEITEGILADECAALLCYFFRMPRQVFNAQKK
AQSSTDSGGSSGGSSGSETPGTSESATPESSGGSSGGSDKKYSIGLAIGTNSVGWAVIT
DEYKVPSKKFKVLGNTDRHSIKKNLIGALLFDSGETAEATRLKRTARRRYTRRKNRI
CYLQEIFSNEMAKVDDSFFHRLEESFLVEEDKKHERHPIFGNIVDEVAYHEKYPTIYH
LRKKLVDSTDKADLRLIYLALAHMIKFRGHFLIEGDLNPDNSDVDKLFIQLVQTYNQ
LFEENPINASGVDAKAILSARLSKSRRLENLIAQLPGEKKNGLFGNLIALSLGLTPNFK
SNFDLAEDAKLQLSKDTYDDDLDNLLAQIGDQYADLFLAAKNLSDAILLSDILRVNT
EITKAPLSASMIKRYDEHHQDLTLLKALVRQQLPEKYKEIFFDQSKNGYAGYIDGGA
SQEEFYKFIKPILEKMDGTEELLVKLNREDLLRKQRTFDNGSIPHQIHLGELHAILRRQ
EDFYPFLKDNREKIEKILTFRIPYYVGPLARGNSRFAWMTRKSEETITPWNFEEVVDK
GASAQSFIERMTNFDKNLPNEKVLPKHSLLYEYFTVYNELTKVKYVTEGMRKPAFLS
GEQKKAIVDLLFKTNRKVTVKQLKEDYFKKIECFDSVEISGVEDRFNASLGTYHDLL
KIIKDKDFLDNEENEDILEDIVLTLTLFEDREMIEERLKTYAHLFDDKVMKQLKRRRY
TGWGRLSRKLINGIRDKQSGKTILDFLKSDGFANRNFMQLIHDDSLTFKEDIQKAQVS
GQGDSLHEHIANLAGSPAIKKGILQTVKVVDELVKVMGRHKPENIVIEMARENQTTQ
KGQKNSRERMKRIEEGIKELGSQILKEHPVENTQLQNEKLYLYYLQNGRDMYVDQE
LDINRLSDYDVDHIVPQSFLKDDSIDNKVLTRSDKNRGKSDNVPSEEVVKKMKNYW
RQLLNAKLITQRKFDNLTKAERGGLSELDKAGFIKRQLVETRQITKHVAQILDSRMN
TKYDENDKLIREVKVITLKSKLVSDFRKDFQFYKVREINNYHHAHDAYLNAVVGTA
LIKKYPKLESEFVYGDYKVYDVRKMIAKSEQEIGKATAKYFFYSNIMNFFKTEITLAN
GEIRKRPLIETNGETGEIVWDKGRDFATVRKVLSMPQVNIVKKTEVQTGGFSKESILP
KRNSDKLIARKKDWDPKKYGGFVSPTVAYSVLVVAKVEKGKSKKLKSVKELLGITI
MERSSFEKNPIDFLEAKGYKEVKKDLIIKLPKYSLFELENGRKRMLASARELQKGNEL
ALPSKYVNFLYLASHYEKLKGSPEDNEQKQLFVEQHKHYLDEIIEQISEFSKRVILAD
ANLDKVLSAYNKHRDKPIREQAENIIHLFTLTNLGAPAAFKYFDTTIDRKQYRSTKEV
LDATLIHQSITGLYETRIDLSQLGGDSGGSKRTADGSEFEPKKKRKV.
xABEmax (SEQ ID NO: 67)
(SEQ ID NO: 67)
MKRTADGSEFESPKKKRKVSEVEFSHEYWMRHALTLAKRAWDEREVPVGA
VLVHNNRVIGEGWNRPIGRHDPTAHAEIMALRQGGLVMQNYRLIDATLYVTLEPCVM
CAGAMIHSRIGRVVFGARDAKTGAAGSLMDVLHHPGMNHRVEITEGILADECAALL
SDFFRMRRQEIKAQKKAQSSTDSGGSSGGSSGSETPGTSESATPESSGGSSGGSSEVEF
SHEYWMRHALTLAKRARDEREVPVGAVLVLNNRVIGEGWNRAIGLHDPTAHAEIMA
LRQGGLVMQNYRLIDATLYVTFEPCVMCAGAMIHSRIGRVVFGVRNAKTGAAGSLM
DVLHYPGMNHRVEITEGILADECAALLCYFFRMPRQVFNAQKKAQSSTDSGGSSGGS
SGSETPGTSESATPESSGGSSGGSDKKYSIGLAIGTNSVGWAVITDEYKVPSKKFKVLG
NTDRHSIKKNLIGALLFDSGETAEATRLKRTARRRYTRRKNRICYLQEIFSNEMAKVD
DSFFHRLEESFLVEEDKKHERHPIFGNIVDEVAYHEKYPTIYHLRKKLVDSTDKADLR
LIYLALAHMIKFRGHFLIEGDLNPDNSDVDKLFIQLVQTYNQLFEENPINASGVDAKA
ILSARLSKSRRLENLIAQLPGEKKNGLFGNLIALSLGLTPNFKSNFDLAEDTKLQLSKD
TYDDDLDNLLAQIGDQYADLFLAAKNLSDAILLSDILRVNTEITKAPLSASMIKLYDE
HHQDLTLLKALVRQQLPEKYKEIFFDQSKNGYAGYIDGGASQEEFYKFIKPILEKMDG
TEELLVKLNREDLLRKQRTFDNGIIPHQIHLGELHAILRRQEDFYPFLKDNREKIEKILT
FRIPYYVGPLARGNSRFAWMTRKSEETITPWNFEKVVDKGASAQSFIERMTNFDKNL
PNEKVLPKHSLLYEYFTVYNELTKVKYVTEGMRKPAFLSGDQKKAIVDLLFKTNRKV
TVKQLKEDYFKKIECFDSVEISGVEDRFNASLGTYHDLLKIIKDKDFLDNEENEDILED
IVLTLTLFEDREMIEERLKTYAHLFDDKVMKQLKRRRYTGWGRLSRKLINGIRDKQS
GKTILDFLKSDGFANRNFIQLIHDDSLTFKEDIQKAQVSGQGDSLHEHIANLAGSPAIK
KGILQTVKVVDELVKVMGRHKPENIVIEMARENQTTQKGQKNSRERMKRIEEGIKEL
GSQILKEHPVENTQLQNEKLYLYYLQNGRDMYVDQELDINRLSDYDVDHIVPQSFLK
DDSIDNKVLTRSDKNRGKSDNVPSEEVVKKMKNYWRQLLNAKLITQRKFDNLTKAE
RGGLSELDKAGFIKRQLVETRQITKHVAQILDSRMNTKYDENDKLIREVKVITLKSKL
VSDFRKDFQFYKVREINNYHHAHDAYLNAVVGTALIKKYPKLESEFVYGDYKVYDV
RKMIAKSEQEIGKATAKYFFYSNIMNFFKTEITLANGEIRKRPLIETNGETGEIVWDKG
RDFATVRKVLSMPQVNIVKKTEVQTGGFSKESILPKRNSDKLIARKKDWDPKKYGGF
DSPTVAYSVLVVAKVEKGKSKKLKSVKELLGITIMERSSFEKNPIDFLEAKGYKEVKK
DLIIKLPKYSLFELENGRKRMLASAGVLQKGNELALPSKYVNFLYLASHYEKLKGSPE
DNEQKQLFVEQHKHYLDEIIEQISEFSKRVILADANLDKVLSAYNKHRDKPIREQAENI
IHLFTLTNLGAPAAFKYFDTTIDRKRYTSTKEVLDATLIHQSITGLYETRIDLSQLGGDS
GGSKRTADGSEFEPKKKRKV.
xABEmax (Met⁻) (SEQ ID NO: 68)
(SEQ ID NO: 68)
KRTADGSEFESPKKKRKVSEVEFSHEYWMRHALTLAKRAWDEREVPVGAVL
VHNNRVIGEGWNRPIGRHDPTAHAEIMALRQGGLVMQNYRLIDATLYVTLEPCVMC
AGAMIHSRIGRVVFGARDAKTGAAGSLMDVLHHPGMNHRVEITEGILADECAALLS
DFFRMRRQEIKAQKKAQSSTDSGGSSGGSSGSETPGTSESATPESSGGSSGGSSEVEFS
HEYWMRHALTLAKRARDEREVPVGAVLVLNNRVIGEGWNRAIGLHDPTAHAEIMAL
RQGGLVMQNYRLIDATLYVTFEPCVMCAGAMIHSRIGRVVFGVRNAKTGAAGSLMD
VLHYPGMNHRVEITEGILADECAALLCYFFRMPRQVFNAQKKAQSSTDSGGSSGGSS
GSETPGTSESATPESSGGSSGGSDKKYSIGLAIGTNSVGWAVITDEYKVPSKKFKVLGN
TDRHSIKKNLIGALLFDSGETAEATRLKRTARRRYTRRKNRICYLQEIFSNEMAKVDD
SFFHRLEESFLVEEDKKHERHPIFGNIVDEVAYHEKYPTIYHLRKKLVDSTDKADLRLI
YLALAHMIKFRGHFLIEGDLNPDNSDVDKLFIQLVQTYNQLFEENPINASGVDAKAIL
SARLSKSRRLENLIAQLPGEKKNGLFGNLIALSLGLTPNFKSNFDLAEDTKLQLSKDT
YDDDLDNLLAQIGDQYADLFLAAKNLSDAILLSDILRVNTEITKAPLSASMIKLYDEH
HQDLTLLKALVRQQLPEKYKEIFFDQSKNGYAGYIDGGASQEEFYKFIKPILEKMDGT
EELLVKLNREDLLRKQRTFDNGIIPHQIHLGELHAILRRQEDFYPFLKDNREKIEKILTF
RIPYYVGPLARGNSRFAWMTRKSEETITPWNFEKVVDKGASAQSFIERMTNFDKNLP
NEKVLPKHSLLYEYFTVYNELTKVKYVTEGMRKPAFLSGDQKKAIVDLLFKTNRKVT
VKQLKEDYFKKIECFDSVEISGVEDRFNASLGTYHDLLKIIKDKDFLDNEENEDILEDI
VLTLTLFEDREMIEERLKTYAHLFDDKVMKQLKRRRYTGWGRLSRKLINGIRDKQSG
KTILDFLKSDGFANRNFIQLIHDDSLTFKEDIQKAQVSGQGDSLHEHIANLAGSPAIKK
GILQTVKVVDELVKVMGRHKPENIVIEMARENQTTQKGQKNSRERMKRIEEGIKELG
SQILKEHPVENTQLQNEKLYLYYLQNGRDMYVDQELDINRLSDYDVDHIVPQSFLKD
DSIDNKVLTRSDKNRGKSDNVPSEEVVKKMKNYWRQLLNAKLITQRKFDNLTKAER
GGLSELDKAGFIKRQLVETRQITKHVAQILDSRMNTKYDENDKLIREVKVITLKSKLV
SDFRKDFQFYKVREINNYHHAHDAYLNAVVGTALIKKYPKLESEFVYGDYKVYDVR
KMIAKSEQEIGKATAKYFFYSNIMNFFKTEITLANGEIRKRPLIETNGETGEIVWDKGR
DFATVRKVLSMPQVNIVKKTEVQTGGFSKESILPKRNSDKLIARKKDWDPKKYGGFD
SPTVAYSVLVVAKVEKGKSKKLKSVKELLGITIMERSSFEKNPIDFLEAKGYKEVKKD
LIIKLPKYSLFELENGRKRMLASAGVLQKGNELALPSKYVNFLYLASHYEKLKGSPED
NEQKQLFVEQHKHYLDEIIEQISEFSKRVILADANLDKVLSAYNKHRDKPIREQAENII
HLFTLTNLGAPAAFKYFDTTIDRKRYTSTKEVLDATLIHQSITGLYETRIDLSQLGGDS
GGSKRTADGSEFEPKKKRKV.

[0016] The xABEmax and xABEmax (Met) are identical amino acid sequences except the xABEmax (Met⁻) removes the N-terminal methionine from xABEmax.

VRER-ABEmax
(SEQ ID NO: 69)
MKRTADGSEFESPKKKRKVSEVEFSHEYWMRHALTLAKRAWDEREVPVGA
VLVHNNRVIGEGWNRPIGRHDPTAHAEIMALRQGGLVMQNYRLIDATLYVTLEPCVM
CAGAMIHSRIGRVVFGARDAKTGAAGSLMDVLHHPGMNHRVEITEGILADECAALL
SDFFRMRRQEIKAQKKAQSSTDSGGSSGGSSGSETPGTSESATPESSGGSSGGSSEVEF
SHEYWMRHALTLAKRARDEREVPVGAVLVLNNRVIGEGWNRAIGLHDPTAHAEIMA
LRQGGLVMQNYRLIDATLYVTFEPCVMCAGAMIHSRIGRVVFGVRNAKTGAAGSLM
DVLHYPGMNHRVEITEGILADECAALLCYFFRMPRQVFNAQKKAQSSTDSGGSSGGS
SGSETPGTSESATPESSGGSSGGSDKKYSIGLAIGTNSVGWAVITDEYKVPSKKFKVLG
NTDRHSIKKNLIGALLFDSGETAEATRLKRTARRRYTRRKNRICYLQEIFSNEMAKVD
DSFFHRLEESFLVEEDKKHERHPIFGNIVDEVAYHEKYPTIYHLRKKLVDSTDKADLR
LIYLALAHMIKFRGHFLIEGDLNPDNSDVDKLFIQLVQTYNQLFEENPINASGVDAKA
ILSARLSKSRRLENLIAQLPGEKKNGLFGNLIALSLGLTPNFKSNFDLAEDAKLQLSKD
TYDDDLDNLLAQIGDQYADLFLAAKNLSDAILLSDILRVNTEITKAPLSASMIKRYDE
HHQDLTLLKALVRQQLPEKYKEIFFDQSKNGYAGYIDGGASQEEFYKFIKPILEKMDG
TEELLVKLNREDLLRKQRTFDNGSIPHQIHLGELHAILRRQEDFYPFLKDNREKIEKILT
FRIPYYVGPLARGNSRFAWMTRKSEETITPWNFEEVVDKGASAQSFIERMTNFDKNL
PNEKVLPKHSLLYEYFTVYNELTKVKYVTEGMRKPAFLSGEQKKAIVDLLFKTNRKV
TVKQLKEDYFKKIECFDSVEISGVEDRFNASLGTYHDLLKIIKDKDFLDNEENEDILED
IVLTLTLFEDREMIEERLKTYAHLFDDKVMKQLKRRRYTGWGRLSRKLINGIRDKQS
GKTILDFLKSDGFANRNFMQLIHDDSLTFKEDIQKAQVSGQGDSLHEHIANLAGSPAI
KKGILQTVKVVDELVKVMGRHKPENIVIEMARENQTTQKGQKNSRERMKRIEEGIKE
LGSQILKEHPVENTQLQNEKLYLYYLQNGRDMYVDQELDINRLSDYDVDHIVPQSFL
KDDSIDNKVLTRSDKNRGKSDNVPSEEVVKKMKNYWRQLLNAKLITQRKFDNLTKA
ERGGLSELDKAGFIKRQLVETRQITKHVAQILDSRMNTKYDENDKLIREVKVITLKSK
LVSDFRKDFQFYKVREINNYHHAHDAYLNAVVGTALIKKYPKLESEFVYGDYKVYD
VRKMIAKSEQEIGKATAKYFFYSNIMNFFKTEITLANGEIRKRPLIETNGETGEIVWDK
GRDFATVRKVLSMPQVNIVKKTEVQTGGFSKESILPKRNSDKLIARKKDWDPKKYGG
FVSPTVAYSVLVVAKVEKGKSKKLKSVKELLGITIMERSSFEKNPIDFLEAKGYKEVK
KDLIIKLPKYSLFELENGRKRMLASARELQKGNELALPSKYVNFLYLASHYEKLKGSP
EDNEQKQLFVEQHKHYLDEIIEQISEFSKRVILADANLDKVLSAYNKHRDKPIREQAE
NIIHLFTLTNLGAPAAFKYFDTTIDRKEYRSTKEVLDATLIHQSITGLYETRIDLSQLGG
DSGGSKRTADGSEFEPKKKRKV (SEQ ID NO: 69).
SaABEmax
(SEQ ID NO. 70)
MKRTADGSEFESPKKKRKVSEVEFSHEYWMRHALTLAKRAWDEREVPVGA
VLVHNNRVIGEGWNRPIGRHDPTAHAEIMALRQGGLVMQNYRLIDATLYVTLEPCVM
CAGAMIHSRIGRVVFGARDAKTGAAGSLMDVLHHPGMNHRVEITEGILADECAALL
SDFFRMRRQEIKAQKKAQSSTDSGGSSGGSSGSETPGTSESATPESSGGSSGGSSEVEF
SHEYWMRHALTLAKRARDEREVPVGAVLVLNNRVIGEGWNRAIGLHDPTAHAEIMA
LRQGGLVMQNYRLIDATLYVTFEPCVMCAGAMIHSRIGRVVFGVRNAKTGAAGSLM
DVLHYPGMNHRVEITEGILADECAALLCYFFRMPRQVFNAQKKAQSSTDSGGSSGGS
SGSETPGTSESATPESSGGSSGGSGKRNYILGLAIGITSVGYGIIDYETRDVIDAGVRLF
KEANVENNEGRRSKRGARRLKRRRRHRIQRVKKLLFDYNLLTDHSELSGINPYEARV
KGLSQKLSEEEFSAALLHLAKRRGVHNVNEVEEDTGNELSTKEQISRNSKALEEKYV
AELQLERLKKDGEVRGSINTRFKTSDYVKEAKQLLKVQKAYHQLDQSFIDTYIDLLET
RRTYYEGPGEGSPFGWKDIKEWYEMLMGHCTYFPEELRSVKYAYNADLYNALNDL
NNLVITRDENEKLEYYEKFQIIENVFKQKKKPTLKQIAKEILVNEEDIKGYRVTSTGKP
EFTNLKVYHDIKDITARKEIIENAELLDQIAKILTIYQSSEDIQEELTNLNSELTQEEIEQI
SNLKGYTGTHNLSLKAINLILDELWHTNDNQIAIFNRLKLVPKKVDLSQQKEIPTTLV
DDFILSPVVKRSFIQSIKVINAIIKKYGLPNDIIIELAREKNSKDAQKMINEMQKRNRQT
NERIEEIIRTTGKENAKYLIEKIKLHDMQEGKCLYSLEMPLEDLLNNPFNYEVDHIIPR
SVSFDNSFNNKVLVKQEENSKKGNRTPFQYLSSSDSKISYETFKKHILNLAKGKGRIS
KTKKEYLLEERDINRFSVQKDFINRNLVDTRYATRGLMNLLRSYFRVNNLDVKVKSIN
GGFTSFLRRKWKFKKERNKGYKHHAEDALIIANADFIFKEWKKLDKAKKVMENQM
FEEKQAESMPEIETEQEYKEIFITPHQIKHIKDFKDYKYSHRVDKKPNRELINDTLYST
RKDDKGNTLIVNNLNGLYDKDNDKLKKLINKSPEKLzMYHHDPQTYQKLKLIMEQY
GDEKNPLYKYYEETGNYLTKYSKKDNGPVIKKIKYYGNKLNAHLDITDDYPNSRNK
VVKLSLKPYRFDVYLDNGVYKFVTVKNLDVIKKENYYEVNSKCYEEAKKLKKISNQ
AEFIASFYNNDLIKINGELYRVIGVNNDLLNRIEVNMIDITYREYLENMNDKRPPRIIKT
IASKTQSIKKYSTDILGNLYEVKSKKHPQIIKKGSGGSKRTADGSEFEPKKKRKV (SEQ
ID NO: 70).
SaKKH-ABEmax
(SEQ ID NO: 71)
MKRTADGSEFESPKKKRKVSEVEFSHEYWMRHALTLAKRAWDEREVPVGA
VLVHNNRVIGEGWNRPIGRHDPTAHAEIMALRQGGLVMQNYRLIDATLYVTLEPCVM
CAGAMIHSRIGRVVFGARDAKTGAAGSLMDVLHHPGMNHRVEITEGILADECAALL
SDFFRMRRQEIKAQKKAQSSTDSGGSSGGSSGSETPGTSESATPESSGGSSGGSSEVEF
SHEYWMRHALTLAKRARDEREVPVGAVLVLNNRVIGEGWNRAIGLHDPTAHAEIMA
LRQGGLVMQNYRLIDATLYVTFEPCVMCAGAMIHSRIGRVVFGVRNAKTGAAGSLM
DVLHYPGMNHRVEITEGILADECAALLCYFFRMPRQVFNAQKKAQSSTDSGGSSGGS
SGSETPGTSESATPESSGGSSGGSGKRNYILGLAIGITSVGYGIIDYETRDVIDAGVRLF
KEANVENNEGRRSKRGARRLKRRRRHRIQRVKKLLFDYNLLTDHSELSGINPYEARV
KGLSQKLSEEEFSAALLHLAKRRGVHNVNEVEEDTGNELSTKEQISRNSKALEEKYV
AELQLERLKKDGEVRGSINIRFKTSDYVKEAKQLLKVQKAYHQLDQSFIDTYIDLLET
RRTYYEGPGEGSPFGWKDIKEWYEMLMGHCTYFPEELRSVKYAYNADLYNALNDL
NNLVITRDENEKLEYYEKFQIIENVFKQKKKPTLKQIAKEILVNEEDIKGYRVTSTGKP
EFTNLKVYHDIKDITARKEIIENAELLDQIAKILTIYQSSEDIQEELTNLNSELTQEEIEQI
SNLKGYTGTHNLSLKAINLILDELWHTNDNQIAIFNRLKLVPKKVDLSQQKEIPTTLV
DDFILSPVVKRSFIQSIKVINAIIKKYGLPNDIIIELAREKNSKDAQKMINEMQKRNRQT
NERIEEIIRTTGKENAKYLIEKIKLHDMQEGKCLYSLEMPLEDLLNNPFNYEVDHIIPR
SVSFDNSFNNKVLVKQEENSKKGNRTPFQYLSSSDSKISYETFKKHILNLAKGKGRIS
KTKKEYLLEERDINRFSVQKDFINRNLVDTRYATRGLMNLLRSYFRVNNLDVKVKSIN
GGFTSFLRRKWKFKKERNKGYKHHAEDALIIANADFIFKEWKKLDKAKKVMENQM
FEEKQAESMPEIETEQEYKEIFITPHQIKHIKDFKDYKYSHRVDKKPNRKLINDTLYST
RKDDKGNTLIVNNLNGLYDKDNDKLKKLINKSPEKLLMYHHDPQTYQKLKLIMEQY
GDEKNPLYKYYEETGNYLTKYSKKDNGPVIKKIKYYGNKLNAHLDITDDYPNSRNK
VVKLSLKPYRFDVYLDNGVYKFVTVKNLDVIKKENYYEVNSKCYEEAKKLKKISNQ
AEFIASFYKNDLIKINGELYRVIGVNNDLLNRIEVNMIDITYREYLENMNDKRPPHIIKT
IASKTQSIKKYSTDILGNLYEVKSKKHPQIIKKGSGGSKRTADGSEFEPKKKRKV (SEQ
ID NO: 71).
CP1012-CBEmax
(SEQ ID NO: 72)
MKRTADGSEFESPKKKRKVSSETGPVAVDPTLRRRIEPHEFEVFFDPRELRKE
TCLLYEINWGGRHSIWRHTSQNTNKHVEVNFIEKFTTERYFCPNTRCSITWFLSWSPC
GECSRAITEFLSRYPHVTLFIYIARLYHHADPRNRQGLRDLISSGVTIQIMTEQESGYC
WRNFVNYSPSNEAHWPRYPHLWVRLYVLELYCIILGLPPCLNILRRKQPQLTFFTIALQ
SCHYQRLPPHILWATGLKSGGSSGGSSGSETPGTSESATPESSGGSSGGSDYKVYDVR
KMIAKSEQEIGKATAKYFFYSNIMNFFKTEITLANGEIRKRPLIETNGETGEIVWDKGR
DFATVRKVLSMPQVNIVKKTEVQTGGFSKESILPKRNSDKLIARKKDWDPKKYGGFD
SPTVAYSVLVVAKVEKGKSKKLKSVKELLGITIMERSSFEKNPIDFLEAKGYKEVKKD
LIIKLPKYSLFELENGRKRMLASAGELQKGNELALPSKYVNFLYLASHYEKLKGSPED
NEQKQLFVEQHKHYLDEIIEQISEFSKRVILADANLDKVLSAYNKHRDKPIREQAENII
HLFTLTNLGAPAAFKYFDTTIDRKRYTSTKEVLDATLIHQSITGLYETRIDLSQLGGDG
GSGGSGGSGGSGGSGGSGGDKKYSIGLAIGTNSVGWAVITDEYKVPSKKFKVLGNTD
RHSIKKNLIGALLFDSGETAEATRLKRTARRRYTRRKNRICYLQEIFSNEMAKVDDSFF
HRLEESFLVEEDKKHERHPIFGNIVDEVAYHEKYPTIYHLRKKLVDSTDKADLRLIYL
ALAHMIKFRGHFLIEGDLNPDNSDVDKLFIQLVQTYNQLFEENPINASGVDAKAILSA
RLSKSRRLENLIAQLPGEKKNGLFGNLIALSLGLTPNFKSNFDLAEDAKLQLSKDTYD
DDLDNLLAQIGDQYADLFLAAKNLSDAILLSDILRVNTEITKAPLSASMIKRYDEHHQ
DLTLLKALVRQQLPEKYKEIFFDQSKNGYAGYIDGGASQEEFYKFIKPILEKMDGTEE
LLVKLNREDLLRKQRTFDNGSIPHQIHLGELHAILRRQEDFYPFLKDNREKIEKILTFRI
PYYVGPLARGNSRFAWMTRKSEETITPWNFEEVVDKGASAQSFIERMTNFDKNLPNE
KVLPKHSLLYEYFTVYNELTKVKYVTEGMRKPAFLSGEQKKAIVDLLFKTNRKVTVK
QLKEDYFKKIECFDSVETSGVEDRFNASLGTYHDLLKIIKDKDFLDNEENEDILEDIVL
TLTLFEDREMIEERLKTYAHLFDDKVMKQLKRRRYTGWGRLSRKLINGIRDKQSGKT
ILDFLKSDGFANRNFMQLIHDDSLTFKEDIQKAQVSGQGDSLHEHIANLAGSPAIKKGI
LQTVKVVDELVKVMGRHKPENIVIEMARENQTTQKGQKNSRERMKRIEEGIKELGS
QILKEHPVENTQLQNEKLYLYYLQNGRDMYVDQELDINRLSDYDVDHIVPQSFLKDD
SIDNKVLTRSDKNRGKSDNVPSEEVVKKMKNYWRQLLNAKLITQRKFDNLTKAERG
GLSELDKAGFIKRQLVETRQITKHVAQILDSRMNTKYDENDKLIREVKVITLKSKLVS
DFRKDFQFYKVREINNYHHAHDAYLNAVVGTALIKKYPKLESEFVYGSGGSKRTADG
SEFEPKKKRKV (SEQ ID NO: 72).
CP1028-CBEmax
(SEQ ID NO: 73)
MKRTADGSEFESPKKKRKVSSETGPVAVDPTLRRRIEPHEFEVFFDPRELRKE
TCLLYEINWGGRHSIWRHTSQNTNKHVEVNFIEKFTTERYFCPNTRCSITWFLSWSPC
GECSRAITEFLSRYPHVTLFIYIARLYHHADPRNRQGLRDLISSGVTIQIMTEQESGYC
WRNFVNYSPSNEAHWPRYPHLWVRLYVLELYCIILGLPPCLNILRRKQPQLTFFTIALQ
SCHYQRLPPHILWATGLKSGGSSGGSSGSETPGTSESATPESSGGSSGGSEIGKATAKYF
FYSNIMNFFKTEITLANGEIRKRPLIETNGETGEIVWDKGRDFATVRKVLSMPQVNIV
KKTEVQTGGFSKESILPKRNSDKLIARKKDWDPKKYGGFDSPTVAYSVLVVAKVEKG
KSKKLKSVKELLGITIMERSSFEKNPIDFLEAKGYKEVKKDLIIKLPKYSLFELENGRK
RMLASAGELQKGNELALPSKYVNFLYLASHYEKLKGSPEDNEQKQLFVEQHKHYLD
EIIEQISEFSKRVILADANLDKVLSAYNKHRDKPIREQAENIIHLFTLTNLGAPAAFKYF
DTTIDRKRYTSTKEVLDATLIHQSITGLYETRIDLSQLGGDGGSGGSGGSGGSGGSGGS
GGMDKKYSIGLAIGTNSVGWAVITDEYKVPSKKFKVLGNTDRHSIKKNLIGALLFDS
GETAEATRLKRTARRRYTRRKNRICYLQEIFSNEMAKVDDSFFHRLEESFLVEEDKKH
ERHPIFGNIVDEVAYHEKYPTIYHLRKKLVDSTDKADLRLIYLALAHMIKFRGHFLIEG
DLNPDNSDVDKLFIQLVQTYNQLFEENPINASGVDAKAILSARLSKSRRLENLIAQLP
GEKKNGLFGNLIALSLGLTPNFKSNFDLAEDAKLQLSKDTYDDDLDNLLAQIGDQYA
DLFLAAKNLSDAILLSDILRVNTEITKAPLSASMIKRYDEHHQDLTLLKALVRQQLPEK
YKEIFFDQSKNGYAGYIDGGASQEEFYKFIKPILEKMDGTEELLVKLNREDLLRKQRT
FDNGSIPHQIHLGELHAILRRQEDFYPFLKDNREKIEKILTFRIPYYVGPLARGNSRFAW
MTRKSEETITPWNFEEVVDKGASAQSFIERMTNFDKNLPNEKVLPKHSLLYEYFTVY
NELTKVKYVTEGMRKPAFLSGEQKKAIVDLLFKTNRKVTVKQLKEDYFKKIECFDSV
EISGVEDRFNASLGTYHDLLKIIKDKDFLDNEENEDILEDIVLTLTLFEDREMIEERLKT
YAHLFDDKVMKQLKRRRYTGWGRLSRKLINGIRDKQSGKTILDFLKSDGFANRNFM
QLIHDDSLTFKEDIQKAQVSGQGDSLHEHIANLAGSPAIKKGILQTVKVVDELVKVMG
RHKPENIVIEMARENQTTQKGQKNSRERMKRIEEGIKELGSQILKEHPVENTQLQNEK
LYLYYLQNGRDMYVDQELDINRLSDYDVDHIVPQSFLKDDSIDNKVLTRSDKNRGKS
DNVPSEEVVKKMKNYWRQLLNAKLITQRKFDNLTKAERGGLSELDKAGFIKRQLVE
TRQITKHVAQILDSRMNTKYDENDKLIREVKVITLKSKLVSDFRKDFQFYKVREINNY
HHAHDAYLNAVVGTALIKKYPKLESEFVYGDYKVYDVRKMIAKSEQSGGSKRTADG
SEFEPKKKRKV (SEQ ID NO: 73).
CP1041-CBEmax
(SEQ ID NO: 74)
MKRTADGSEFESPKKKRKVSSETGPVAVDPTLRRRIEPHEFEVFFDPRELRKE
TCLLYEINWGGRHSIWRHTSQNTNKHVEVNFIEKFTTERYFCPNTRCSITWFLSWSPC
GECSRAITEFLSRYPHVTLFIYIARLYHHADPRNRQGLRDLISSGVTIQIMTEQESGYC
WRNFVNYSPSNEAHWPRYPHLWVRLYVLELYCIILGLPPCLNILRRKQPQLTFFTIALQ
SCHYQRLPPHILWATGLKSGGSSGGSSGSETPGTSESATPESSGGSSGGSNIMNFFKTEI
TLANGEIRKRPLIETNGETGEIVWDKGRDFATVRKVLSMPQVNIVKKTEVQTGGFSK
ESILPKRNSDKLIARKKDWDPKKYGGFDSPTVAYSVLVVAKVEKGKSKKLKSVKELL
GITIMERSSFEKNPIDFLEAKGYKEVKKDLIIKLPKYSLFELENGRKRMLASAGELQK
GNELALPSKYVNFLYLASHYEKLKGSPEDNEQKQLFVEQHKHYLDEIIEQISEFSKRVI
LADANLDKVLSAYNKHRDKPIREQAENIIHLFTLTNLGAPAAFKYFDTTIDRKRYTST
KEVLDATLIHQSITGLYETRIDLSQLGGDGGSGGSGGSGGSGGSGGSGGDKKYSIGLA
IGTNSVGWAVITDEYKVPSKKFKVLGNTDRHSIKKNLIGALLFDSGETAEATRLKRTA
RRRYTRRKNRICYLQEIFSNEMAKVDDSFFHRLEESFLVEEDKKHERHPIFGNIVDEVA
YHEKYPTIYHLRKKLVDSTDKADLRLIYLALAHMIKFRGHFLIEGDLNPDNSDVDKL
FIQLVQTYNQLFEENPINASGVDAKAILSARLSKSRRLENLIAQLPGEKKNGLFGNLIA
LSLGLTPNFKSNFDLAEDAKLQLSKDTYDDDLDNLLAQIGDQYADLFLAAKNLSDAI
LLSDILRVNTEITKAPLSASMIKRYDEHHQDLTLLKALVRQQLPEKYKEIFFDQSKNGY
AGYIDGGASQEEFYKFIKPILEKMDGTEELLVKLNREDLLRKQRTFDNGSIPHQIHLGE
LHAILRRQEDFYPFLKDNREKIEKILTFRIPYYVGPLARGNSRFAWMTRKSEETITPWN
FEEVVDKGASAQSFIERMTNFDKNLPNEKVLPKHSLLYEYFTVYNELTKVKYVTEGM
RKPAFLSGEQKKAIVDLLFKTNRKVTVKQLKEDYFKKIECFDSVETSGVEDRFNASLG
TYHDLLKIIKDKDFLDNEENEDILEDIVLTLTLFEDREMIEERLKTYAHLFDDKVMKQ
LKRRRYTGWGRLSRKLINGIRDKQSGKTILDFLKSDGFANRNFMQLIHDDSLTFKEDI
QKAQVSGQGDSLHEHIANLAGSPAIKKGILQTVKVVDELVKVMGRHKPENIVIEMAR
ENQTTQKGQKNSRERMKRIEEGIKELGSQILKEHPVENTQLQNEKLYLYYLQNGRDM
YVDQELDINRLSDYDVDHIVPQSFLKDDSIDNKVLTRSDKNRGKSDNVPSEEVVKKM
KNYWRQLLNAKLITQRKFDNLTKAERGGLSELDKAGFIKRQLVETRQITKHVAQILD
SRMNTKYDENDKLIREVKVITLKSKLVSDFRKDFQFYKVREINNYHHAHDAYLNAV
VGTALIKKYPKLESEFVYGDYKVYDVRKMIAKSEQEIGKATAKYFFYSSGGSKRTAD
GSEFEPKKKRKV (SEQ ID NO: 74).
CP1249-CBEmax
(SEQ ID NO: 75)
MKRTADGSEFESPKKKRKVSSETGPVAVDPTLRRRIEPHEFEVFFDPRELRKE
TCLLYEINWGGRHSIWRHTSQNTNKHVEVNFIEKFTTERYFCPNTRCSITWFLSWSPC
GECSRAITEFLSRYPHVTLFIYIARLYHHADPRNRQGLRDLISSGVTIQIMTEQESGYC
WRNFVNYSPSNEAHWPRYPHLWVRLYVLELYCIILGLPPCLNILRRKQPQLTFFTIALQ
SCHYQRLPPHILWATGLKSGGSSGGSSGSETPGTSESATPESSGGSSGGSPEDNEQKQL
FVEQHKHYLDEIIEQISEFSKRVILADANLDKVLSAYNKHRDKPIREQAENIIHLFTLTN
LGAPAAFKYFDTTIDRKRYTSTKEVLDATLIHQSITGLYETRIDLSQLGGDGGSGGSGG
SGGSGGSGGSGGMDKKYSIGLAIGTNSVGWAVITDEYKVPSKKFKVLGNTDRHSIKK
NLIGALLFDSGETAEATRLKRTARRRYTRRKNRICYLQEIFSNEMAKVDDSFFHRLEES
FLVEEDKKHERHPIFGNIVDEVAYHEKYPTIYHLRKKLVDSTDKADLRLIYLALAHMI
KFRGHFLIEGDLNPDNSDVDKLFIQLVQTYNQLFEENPINASGVDAKAILSARLSKSR
RLENLIAQLPGEKKNGLFGNLIALSLGLTPNFKSNFDLAEDAKLQLSKDTYDDDLDN
LLAQIGDQYADLFLAAKNLSDAILLSDILRVNTEITKAPLSASMIKRYDEHHQDLTLLK
ALVRQQLPEKYKEIFFDQSKNGYAGYIDGGASQEEFYKFIKPILEKMDGTEELLVKLN
REDLLRKQRTFDNGSIPHQIHLGELHAILRRQEDFYPFLKDNREKIEKILTFRIPYYVGP
LARGNSRFAWMTRKSEETITPWNFEEVVDKGASAQSFIERMTNFDKNLPNEKVLPKH
SLLYEYFTVYNELTKVKYVTEGMRKPAFLSGEQKKAIVDLLFKTNRKVTVKQLKED
YFKKIECFDSVETSGVEDRFNASLGTYHDLLKIIKDKDFLDNEENEDILEDIVLTLTLFE
DREMIEERLKTYAHLFDDKVMKQLKRRRYTGWGRLSRKLINGIRDKQSGKTILDFLK
SDGFANRNFMQLIHDDSLTFKEDIQKAQVSGQGDSLHEHIANLAGSPAIKKGILQTVK
VVDELVKVMGRHKPENIVIEMARENQTTQKGQKNSRERMKRIEEGIKELGSQILKEH
PVENTQLQNEKLYLYYLQNGRDMYVDQELDINRLSDYDVDHIVPQSFLKDDSIDNK
VLTRSDKNRGKSDNVPSEEVVKKMKNYWRQLLNAKLITQRKFDNLTKAERGGLSEL
DKAGFIKRQLVETRQITKHVAQILDSRMNTKYDENDKLIREVKVITLKSKLVSDFRKD
FQFYKVREINNYHHAHDAYLNAVVGTALIKKYPKLESEFVYGDYKVYDVRKMIAKS
EQEIGKATAKYFFYSNIMNFFKTEITLANGEIRKRPLIETNGETGEIVWDKGRDFATVR
KVLSMPQVNIVKKTEVQTGGFSKESILPKRNSDKLIARKKDWDPKKYGGFDSPTVAY
SVLVVAKVEKGKSKKLKSVKELLGITIMERSSFEKNPIDFLEAKGYKEVKKDLIIKLPK
YSLFELENGRKRMLASAGELQKGNELALPSKYVNFLYLASHYEKLKGSSGGSKRTAD
GSEFEPKKKRKV (SEQ ID NO: 75).
CP1300-CBEmax
(SEQ ID NO: 76)
MKRTADGSEFESPKKKRKVSSETGPVAVDPTLRRRIEPHEFEVFFDPRELRKE
TCLLYEINWGGRHSIWRHTSQNTNKHVEVNFIEKFTTERYFCPNTRCSITWFLSWSPC
GECSRAITEFLSRYPHVTLFIYIARLYHHADPRNRQGLRDLISSGVTIQIMTEQESGYC
WRNFVNYSPSNEAHWPRYPHLWVRLYVLELYCIILGLPPCLNILRRKQPQLTFFTIALQ
SCHYQRLPPHILWATGLKSGGSSGGSSGSETPGTSESATPESSGGSSGGSKPIREQAENI
IHLFTLTNLGAPAAFKYFDTTIDRKRYTSTKEVLDATLIHQSITGLYETRIDLSQLGGDG
GSGGSGGSGGSGGSGGSGGDKKYSIGLAIGTNSVGWAVITDEYKVPSKKFKVLGNTD
RHSIKKNLIGALLFDSGETAEATRLKRTARRRYTRRKNRICYLQEIFSNEMAKVDDSFF
HRLEESFLVEEDKKHERHPIFGNIVDEVAYHEKYPTIYHLRKKLVDSTDKADLRLIYL
ALAHMIKFRGHFLIEGDLNPDNSDVDKLFIQLVQTYNQLFEENPINASGVDAKAILSA
RLSKSRRLENLIAQLPGEKKNGLFGNLIALSLGLTPNFKSNFDLAEDAKLQLSKDTYD
DDLDNLLAQIGDQYADLFLAAKNLSDAILLSDILRVNTEITKAPLSASMIKRYDEHHQ
DLTLLKALVRQQLPEKYKEIFFDQSKNGYAGYIDGGASQEEFYKFIKPILEKMDGTEE
LLVKLNREDLLRKQRTFDNGSIPHQIHLGELHAILRRQEDFYPFLKDNREKIEKILTFRI
PYYVGPLARGNSRFAWMTRKSEETITPWNFEEVVDKGASAQSFIERMTNFDKNLPNE
KVLPKHSLLYEYFTVYNELTKVKYVTEGMRKPAFLSGEQKKAIVDLLFKTNRKVTVK
QLKEDYFKKIECFDSVETSGVEDRFNASLGTYHDLLKIIKDKDFLDNEENEDILEDIVL
TLTLFEDREMIEERLKTYAHLFDDKVMKQLKRRRYTGWGRLSRKLINGIRDKQSGKT
ILDFLKSDGFANRNFMQLIHDDSLTFKEDIQKAQVSGQGDSLHEHIANLAGSPAIKKGI
LQTVKVVDELVKVMGRHKPENIVIEMARENQTTQKGQKNSRERMKRIEEGIKELGS
QILKEHPVENTQLQNEKLYLYYLQNGRDMYVDQELDINRLSDYDVDHIVPQSFLKDD
SIDNKVLTRSDKNRGKSDNVPSEEVVKKMKNYWRQLLNAKLITQRKFDNLTKAERG
GLSELDKAGFIKRQLVETRQITKHVAQILDSRMNTKYDENDKLIREVKVITLKSKLVS
DFRKDFQFYKVREINNYHHAHDAYLNAVVGTALIKKYPKLESEFVYGDYKVYDVRK
MIAKSEQEIGKATAKYFFYSNIMNFFKTEITLANGEIRKRPLIETNGETGEIVWDKGRD
FATVRKVLSMPQVNIVKKTEVQTGGFSKESILPKRNSDKLIARKKDWDPKKYGGFDS
PTVAYSVLVVAKVEKGKSKKLKSVKELLGITIMERSSFEKNPIDFLEAKGYKEVKKDL
IIKLPKYSLFELENGRKRMLASAGELQKGNELALPSKYVNFLYLASHYEKLKGSPEDN
EQKQLFVEQHKHYLDEIIEQISEFSKRVILADANLDKVLSAYNKHRDSGGSKRTADGS
EFEPKKKRKV (SEQ ID NO: 76).
CP1012-ABEmax
(SEQ ID NO: 77)
MKRTADGSEFESPKKKRKVSEVEFSHEYWMRHALTLAKRAWDEREVPVGA
VLVHNNRVIGEGWNRPIGRHDPTAHAEIMALRQGGLVMQNYRLIDATLYVTLEPCVM
CAGAMIHSRIGRVVFGARDAKTGAAGSLMDVLHHPGMNHRVEITEGILADECAALL
SDFFRMRRQEIKAQKKAQSSTDSGGSSGGSSGSETPGTSESATPESSGGSSGGSSEVEF
SHEYWMRHALTLAKRARDEREVPVGAVLVLNNRVIGEGWNRAIGLHDPTAHAEIMA
LRQGGLVMQNYRLIDATLYVTFEPCVMCAGAMIHSRIGRVVFGVRNAKTGAAGSLM
DVLHYPGzNHRVEITEGILADECAALLCYFFRMPRQVFNAQKKAQSSTDSGGSSGGS
SGSETPGTSESATPESSGGSSGGSDYKVYDVRKMIAKSEQEIGKATAKYFFYSNIMNFF
KTEITLANGEIRKRPLIETNGETGEIVWDKGRDFATVRKVLSMPQVNIVKKTEVQTGG
FSKESILPKRNSDKLIARKKDWDPKKYGGFDSPTVAYSVLVVAKVEKGKSKKLKSVK
ELLGITIMERSSFEKNPIDFLEAKGYKEVKKDLIIKLPKYSLFELENGRKRMLASAGEL
QKGNELALPSKYVNFLYLASHYEKLKGSPEDNEQKQLFVEQHKHYLDEIIEQISEFSK
RVILADANLDKVLSAYNKHRDKPIREQAENIIHLFTLTNLGAPAAFKYFDTTIDRKRYT
STKEVLDATLIHQSITGLYETRIDLSQLGGDGGSGGSGGSGGSGGSGGSGGDKKYSIG
LAIGTNSVGWAVITDEYKVPSKKFKVLGNTDRHSIKKNLIGALLFDSGETAEATRLKR
TARRRYTRRKNRICYLQEIFSNEMAKVDDSFFHRLEESFLVEEDKKHERHP1FGNIVDE
VAYHEKYPTIYHLRKKLVDSTDKADLRLIYLALAHMIKFRGHFLIEGDLNPDNSDVD
KLFIQLVQTYNQLFEENPINASGVDAKAILSARLSKSRRLENLIAQLPGEKKNGLFGN
LIALSLGLTPNFKSNFDLAEDAKLQLSKDTYDDDLDNLLAQIGDQYADLFLAAKNLS
DAILLSDILRVNTEITKAPLSASMIKRYDEHHQDLTLLKALVRQQLPEKYKEIFFDQSK
NGYAGYIDGGASQEEFYKFIKPILEKMDGTEELLVKLNREDLLRKQRTFDNGSIPHQI
HLGELHAILRRQEDFYPFLKDNREKIEKILTFRIPYYVGPLARGNSRFAWMTRKSEETI
TPWNFEEVVDKGASAQSFIERMTNFDKNLPNEKVLPKHSLLYEYFTVYNELTKVKYV
TEGMRKPAFLSGEQKKAIVDLLFKTNRKVTVKQLKEDYFKKIECFDSVEISGVEDRF
NASLGTYHDLLKIIKDKDFLDNEENEDILEDIVLTLTLFEDREMIEERLKTYAHLFDDK
VMKQLKRRRYTGWGRLSRKLINGIRDKQSGKTILDFLKSDGFANRNFMQLIHDDSLT
FKEDIQKAQVSGQGDSLHEHIANLAGSPAIKKGILQTVKVVDELVKVMGRHKPENIVI
EMARENQTTQKGQKNSRERMKRIEEGIKELGSQILKEHPVENTQLQNEKLYLYYLQN
GRDMYVDQELDINRLSDYDVDHIVPQSFLKDDSIDNKVLTRSDKNRGKSDNVPSEEV
VKKMKNYWRQLLNAKLITQRKFDNLTKAERGGLSELDKAGFIKRQLVETRQITKHV
AQILDSRMNTKYDENDKLIREVKVITLKSKLVSDFRKDFQFYKVREINNYHHAHDAY
LNAVVGTALIKKYPKLESEFVYGSGGSKRTADGSEFEPKKKRKV (SEQ ID NO: 77).
CP1028-ABEmax
(SEQ ID NO: 78)
MKRTADGSEFESPKKKRKVSEVEFSHEYWMRHALTLAKRAWDEREVPVGAVLVHN
NRVIGEGWNRPIGRHDPTAHAEIMALRQGGLVMQNYRLIDATLYVTLEPCVMCAGAMIH
SRIGRVVFGARDAKTGAAGSLMDVLHHPGMNHRVEITEGILADECAALLSDFFRMRRQ
EIKAQKKAQSSTDSGGSSGGSSGSETPGTSESATPESSGGSSGGSSEVEFSHEYWM
RHALTLAKRARDEREVPVGAVLVLNNRVIGEGWNRAIGLHDPTAHAEIMALRQGGLVM
QNYRLIDATLYVTFEPCVMCAGAMIHSRIGRVVFGVRNAKTGAAGSLMDVLHYPGMN
HRVEITEGILADECAALLCYFFRMPRQVFNAQKKAQSSTDSGGSSGGSSGSETPGTSE
SATPESSGGSSGGSEIGKATAKYFFYSNIMNFFKTEITLANGEIRKRPLIETNGETGEIV
WDKGRDFATVRKVLSMPQVNIVKKTEVQTGGFSKESILPKRNSDKLIARKKDWDPKKY
GGFDSPTVAYSVLVVAKVEKGKSKKLKSVKELLGITIMERSSFEKNPIDFLEAKGYKEVK
KDLIIKLPKYSLFELENGRKRMLASAGELQKGNELALPSKYVNFLYLASHYEKLKGSPE
DNEQKQLFVEQHKHYLDEIIEQISEFSKRVILADANLDKVLSAYNKHRDKPIREQAENIIH
LFTLTNLGAPAAFKYFDTTIDRKRYTSTKEVLDATLIHQSITGLYETRIDLSQLGGDGGS
GGSGGSGGSGGSGGSGGMDKKYSIGLAIGTNSVGWAVITDEYKVPSKKFKVLGNTDR
HSIKKNLIGALLFDSGETAEATRLKRTARRRYTRRKNRICYLQEIFSNEMAKVDDSFFHR
LEESFLVEEDKKHERHPIFGNIVDEVAYHEKYPTIYHLRKKLVDSTDKADLRLIYLALAH
MIKFRGHFLIEGDLNPDNSDVDKLFIQLVQTYNQLFEENPINASGVDAKAILSARLSKSR
RLENLIAQLPGEKKNGLFGNLIALSLGLTPNFKSNFDLAEDAKLQLSKDTYDDDLDNLLA
QIGDQYADLFLAAKNLSDAILLSDILRVNTEITKAPLSASMIKRYDEHHQDLTLLKALVRQ
QLPEKYKEIFFDQSKNGYAGYIDGGASQEEFYKFIKPILEKMDGTEELLVKLNREDLLRK
QRTFDNGSIPHQIHLGELHAILRRQEDFYPFLKDNREKIEKILTFRIPYYVGPLARGNSRF
AWMTRKSEETITPWNFEEVVDKGASAQSFIERMTNFDKNLPNEKVLPKHSLLYEYFTV
YNELTKVKYVTEGMRKPAFLSGEQKKAIVDLLFKTNRKVTVKQLKEDYFKKIECFDSVEI
SGVEDRFNASLGTYHDLLKIIKDKDFLDNEENEDILEDIVLTLTLFEDREMIEERLKTYAH
LFDDKVMKQLKRRRYTGWGRLSRKLINGIRDKQSGKTILDFLKSDGFANRNFMQLIHD
DSLTFKEDIQKAQVSGQGDSLHEHIANLAGSPAIKKGILQTVKVVDELVKVMGRHKPEN
IVIEMARENQTTQKGQKNSRERMKRIEEGIKELGSQILKEHPVENTQLQNEKLYLYYLQ
NGRDMYVDQELDINRLSDYDVDHIVPQSFLKDDSIDNKVLTRSDKNRGKSDNVPSEEV
VKKMKNYWRQLLNAKLITQRKFDNLTKAERGGLSELDKAGFIKRQLVETRQITKHVAQI
LDSRMNTKYDENDKLIREVKVITLKSKLVSDFRKDFQFYKVREINNYHHAHDAYLNAVV
GTALIKKYPKLESEFVYGDYKVYDVRKMIAKSEQSGGSKRTADGSEFEPKKKRKV (SEQ ID
NO: 78)
CP1041-ABEmax
(SEQ ID NO: 79)
MKRTADGSEFESPKKKRKVSEVEFSHEYWMRHALTLAKRAWDEREVPVGAVLVHN
NRVIGEGWNRPIGRHDPTAHAEIMALRQGGLVMQNYRLIDATLYVTLEPCVMCAGAMIH
SRIGRVVFGARDAKTGAAGSLMDVLHHPGMNHRVEITEGILADECAALLSDFFRMRRQ
EIKAQKKAQSSTDSGGSSGGSSGSETPGTSESATPESSGGSSGGSSEVEFSHEYWM
RHALTLAKRARDEREVPVGAVLVLNNRVIGEGWNRAIGLHDPTAHAEIMALRQGGLVM
QNYRLIDATLYVTFEPCVMCAGAMIHSRIGRVVFGVRNAKTGAAGSLMDVLHYPGMN
HRVEITEGILADECAALLCYFFRMPRQVFNAQKKAQSSTDSGGSSGGSSGSETPGTSE
SATPESSGGSSGGSNIMNFFKTEITLANGEIRKRPLIETNGETGEIVWDKGRDFATVRK
VLSMPQVNIVKKTEVQTGGFSKESILPKRNSDKLIARKKDWDPKKYGGFDSPTVAYSV
LVVAKVEKGKSKKLKSVKELLGITIMERSSFEKNPIDFLEAKGYKEVKKDLIIKLPKYSLF
ELENGRKRMLASAGELQKGNELALPSKYVNFLYLASHYEKLKGSPEDNEQKQLFVEQ
HKHYLDEIIEQISEFSKRVILADANLDKVLSAYNKHRDKPIREQAENIIHLFTLTNLGAPAA
FKYFDTTIDRKRYTSTKEVLDATLIHQSITGLYETRIDLSQLGGDGGSGGSGGSGGSGG
SGGSGGDKKYSIGLAIGTNSVGWAVITDEYKVPSKKFKVLGNTDRHSIKKNLIGALLFD
SGETAEATRLKRTARRRYTRRKNRICYLQEIFSNEMAKVDDSFFHRLEESFLVEEDKK
HERHPIFGNIVDEVAYHEKYPTIYHLRKKLVDSTDKADLRLIYLALAHMIKFRGHFLIEGD
LNPDNSDVDKLFIQLVQTYNQLFEENPINASGVDAKAILSARLSKSRRLENLIAQLPGEK
KNGLFGNLIALSLGLTPNFKSNFDLAEDAKLQLSKDTYDDDLDNLLAQIGDQYADLFLA
AKNLSDAILLSDILRVNTEITKAPLSASMIKRYDEHHQDLTLLKALVRQQLPEKYKEIFFD
QSKNGYAGYIDGGASQEEFYKFIKPILEKMDGTEELLVKLNREDLLRKQRTFDNGSIPH
QIHLGELHAILRRQEDFYPFLKDNREKIEKILTFRIPYYVGPLARGNSRFAWMTRKSEET
ITPWNFEEVVDKGASAQSFIERMTNFDKNLPNEKVLPKHSLLYEYFTVYNELTKVKYVT
EGMRKPAFLSGEQKKAIVDLLFKTNRKVTVKQLKEDYFKKIECFDSVEISGVEDRFNAS
LGTYHDLLKIIKDKDFLDNEENEDILEDIVLTLTLFEDREMIEERLKTYAHLFDDKVMKQL
KRRRYTGWGRLSRKLINGIRDKQSGKTILDFLKSDGFANRNFMQLIHDDSLTFKEDIQK
AQVSGQGDSLHEHIANLAGSPAIKKGILQTVKVVDELVKVMGRHKPENIVIEMARENQT
TQKGQKNSRERMKRIEEGIKELGSQILKEHPVENTQLQNEKLYLYYLQNGRDMYVDQE
LDINRLSDYDVDHIVPQSFLKDDSIDNKVLTRSDKNRGKSDNVPSEEVVKKMKNYWRQ
LLNAKLITQRKFDNLTKAERGGLSELDKAGFIKRQLVETRQITKHVAQILDSRMNTKYDE
NDKLIREVKVITLKSKLVSDFRKDFQFYKVREINNYHHAHDAYLNAVVGTALIKKYPKLE
SEFVYGDYKVYDVRKMIAKSEQEIGKATAKYFFYSSGGSKRTADGSEFEPKKKRKV (SEQ ID
NO: 79)
CP1249-ABEmax
(SEQ ID NO: 80)
MKRTADGSEFESPKKKRKVSEVEFSHEYWMRHALTLAKRAWDEREVPVGAVLVHN
NRVIGEGWNRPIGRHDPTAHAEIMALRQGGLVMQNYRLIDATLYVTLEPCVMCAGAMIH
SRIGRVVFGARDAKTGAAGSLMDVLHHPGMNHRVEITEGILADECAALLSDFFRMRRQ
EIKAQKKAQSSTDSGGSSGGSSGSETPGTSESATPESSGGSSGGSSEVEFSHEYWM
RHALTLAKRARDEREVPVGAVLVLNNRVIGEGWNRAIGLHDPTAHAEIMALRQGGLVM
QNYRLIDATLYVTFEPCVMCAGAMIHSRIGRVVFGVRNAKTGAAGSLMDVLHYPGMN
HRVEITEGILADECAALLCYFFRMPRQVFNAQKKAQSSTDSGGSSGGSSGSETPGTSE
SATPESSGGSSGGSPEDNEQKQLFVEQHKHYLDEIIEQISEFSKRVILADANLDKVLSA
YNKHRDKPIREQAENIIHLFTLTNLGAPAAFKYFDTTIDRKRYTSTKEVLDATLIHQSITGL
YETRIDLSQLGGDGGSGGSGGSGGSGGSGGSGGMDKKYSIGLAIGTNSVGWAVITDE
YKVPSKKFKVLGNTDRHSIKKNLIGALLFDSGETAEATRLKRTARRRYTRRKNRICYLQ
EIFSNEMAKVDDSFFHRLEESFLVEEDKKHERHPIFGNIVDEVAYHEKYPTIYHLRKKLV
DSTDKADLRLIYLALAHMIKFRGHFLIEGDLNPDNSDVDKLFIQLVQTYNQLFEENPINA
SGVDAKAILSARLSKSRRLENLIAQLPGEKKNGLFGNLIALSLGLTPNFKSNFDLAEDAK
LQLSKDTYDDDLDNLLAQIGDQYADLFLAAKNLSDAILLSDILRVNTEITKAPLSASMIKR
YDEHHQDLTLLKALVRQQLPEKYKEIFFDQSKNGYAGYIDGGASQEEFYKFIKPILEKM
DGTEELLVKLNREDLLRKQRTFDNGSIPHQIHLGELHAILRRQEDFYPFLKDNREKIEKIL
TFRIPYYVGPLARGNSRFAWMTRKSEETITPWNFEEVVDKGASAQSFIERMTNFDKNL
PNEKVLPKHSLLYEYFTVYNELTKVKYVTEGMRKPAFLSGEQKKAIVDLLFKTNRKVTV
KQLKEDYFKKIECFDSVEISGVEDRFNASLGTYHDLLKIIKDKDFLDNEENEDILEDIVLTL
TLFEDREMIEERLKTYAHLFDDKVMKQLKRRRYTGWGRLSRKLINGIRDKQSGKTILDF
LKSDGFANRNFMQLIHDDSLTFKEDIQKAQVSGQGDSLHEHIANLAGSPAIKKGILQTV
KVVDELVKVMGRHKPENIVIEMARENQTTQKGQKNSRERMKRIEEGIKELGSQILKEHP
VENTQLQNEKLYLYYLQNGRDMYVDQELDINRLSDYDVDHIVPQSFLKDDSIDNKVLTR
SDKNRGKSDNVPSEEVVKKMKNYWRQLLNAKLITQRKFDNLTKAERGGLSELDKAGFI
KRQLVETRQITKHVAQILDSRMNTKYDENDKLIREVKVITLKSKLVSDFRKDFQFYKVRE
INNYHHAHDAYLNAVVGTALIKKYPKLESEFVYGDYKVYDVRKMIAKSEQEIGKATAKY
FFYSNIMNFFKTEITLANGEIRKRPLIETNGETGEIVWDKGRDFATVRKVLSMPQVNIVK
KTEVQTGGFSKESILPKRNSDKLIARKKDWDPKKYGGFDSPTVAYSVLVVAKVEKGKS
KKLKSVKELLGITIMERSSFEKNPIDFLEAKGYKEVKKDLIIKLPKYSLFELENGRKRMLA
SAGELQKGNELALPSKYVNFLYLASHYEKLKGSSGGSKRTADGSEFEPKKKRKV (SEQ ID
NO: 80)
CP1300-ABEmax
(SEQ ID NO: 81)
MKRTADGSEFESPKKKRKVSEVEFSHEYWMRHALTLAKRAWDEREVPVGAVLVHN
NRVIGEGWNRPIGRHDPTAHAEIMALRQGGLVMQNYRLIDATLYVTLEPCVMCAGAMIH
SRIGRVVFGARDAKTGAAGSLMDVLHHPGMNHRVEITEGILADECAALLSDFFRMRRQ
EIKAQKKAQSSTDSGGSSGGSSGSETPGTSESATPESSGGSSGGSSEVEFSHEYWM
RHALTLAKRARDEREVPVGAVLVLNNRVIGEGWNRAIGLHDPTAHAEIMALRQGGLVM
QNYRLIDATLYVTFEPCVMCAGAMIHSRIGRVVFGVRNAKTGAAGSLMDVLHYPGMN
HRVEITEGILADECAALLCYFFRMPRQVFNAQKKAQSSTDSGGSSGGSSGSETPGTSE
SATPESSGGSSGGSKPIREQAENIIHLFTLTNLGAPAAFKYFDTTIDRKRYTSTKEVLDA
TLIHQSITGLYETRIDLSQLGGDGGSGGSGGSGGSGGSGGSGGDKKYSIGLAIGTNSV
GWAVITDEYKVPSKKFKVLGNTDRHSIKKNLIGALLFDSGETAEATRLKRTARRRYTRR
KNRICYLQEIFSNEMAKVDDSFFHRLEESFLVEEDKKHERHPIFGNIVDEVAYHEKYPTI
YHLRKKLVDSTDKADLRLIYLALAHMIKFRGHFLIEGDLNPDNSDVDKLFIQLVQTYNQL
FEENPINASGVDAKAILSARLSKSRRLENLIAQLPGEKKNGLFGNLIALSLGLTPNFKSN
FDLAEDAKLQLSKDTYDDDLDNLLAQIGDQYADLFLAAKNLSDAILLSDILRVNTEITKAP
LSASMIKRYDEHHQDLTLLKALVRQQLPEKYKEIFFDQSKNGYAGYIDGGASQEEFYKF
IKPILEKMDGTEELLVKLNREDLLRKQRTFDNGSIPHQIHLGELHAILRRQEDFYPFLKD
NREKIEKILTFRIPYYVGPLARGNSRFAWMTRKSEETITPWNFEEVVDKGASAQSFIER
MTNFDKNLPNEKVLPKHSLLYEYFTVYNELTKVKYVTEGMRKPAFLSGEQKKAIVDLLF
KTNRKVTVKQLKEDYFKKIECFDSVEISGVEDRFNASLGTYHDLLKIIKDKDFLDNEENE
DILEDIVLTLTLFEDREMIEERLKTYAHLFDDKVMKQLKRRRYTGWGRLSRKLINGIRDK
QSGKTILDFLKSDGFANRNFMQLIHDDSLTFKEDIQKAQVSGQGDSLHEHIANLAGSPA
IKKGILQTVKVVDELVKVMGRHKPENIVIEMARENQTTQKGQKNSRERMKRIEEGIKEL
GSQILKEHPVENTQLQNEKLYLYYLQNGRDMYVDQELDINRLSDYDVDHIVPQSFLKD
DSIDNKVLTRSDKNRGKSDNVPSEEVVKKMKNYWRQLLNAKLITQRKFDNLTKAERG
GLSELDKAGFIKRQLVETRQITKHVAQILDSRMNTKYDENDKLIREVKVITLKSKLVSDF
RKDFQFYKVREINNYHHAHDAYLNAVVGTALIKKYPKLESEFVYGDYKVYDVRKMIAKS
EQEIGKATAKYFFYSNIMNFFKTEITLANGEIRKRPLIETNGETGEIVWDKGRDFATVRK
VLSMPQVNIVKKTEVQTGGFSKESILPKRNSDKLIARKKDWDPKKYGGFDSPTVAYSV
LVVAKVEKGKSKKLKSVKELLGITIMERSSFEKNPIDFLEAKGYKEVKKDLIIKLPKYSLF
ELENGRKRMLASAGELQKGNELALPSKYVNFLYLASHYEKLKGSPEDNEQKQLFVEQ
HKHYLDEIIEQISEFSKRVILADANLDKVLSAYNKHRDSGGSKRTADGSEFEPKKKRKV (SEQ
ID NO: 81).

[0017] In some embodiments, the circularly permuted napDNA/RNAbp is a circularly permuted Cas9, or a variant thereof, that is capable of binding DNA or RNA when complexed with a guide RNA (gRNA).

[0018] In some embodiments, the circularly permuted napDNA/RNAbp is a circularly permuted nuclease active Cas9, a circularly permuted Cas9 nickase (Cas9n), a circularly permuted nuclease inactive Cas9 (Cas9d), or a variant thereof, that is capable of binding DNA or RNA when complexed with a guide RNA (gRNA).

[0019] In some embodiments, the nucleic acid effector domain is closer in proximity to a single stranded DNA (ssDNA) loop that is formed in a double stranded DNA molecule when the gRNA complexed with the fusion protein binds to a strand of the double stranded DNA molecule, as compared to a fusion protein that has a corresponding non-circularly permuted Cas9, optionally wherein the corresponding non-circularly permuted Cas9 is a wild-type Cas9, or a variant thereof, that is capable of binding DNA when complexed with a guide RNA (gRNA).

[0020] In some embodiments, the circularly permuted napDNA/RNAbp is a circularly permuted Cas9 that is circularly permuted at any one of amino acid residue numbers 1000 to 1350 of a Cas9, or a variant thereof, that is capable of binding DNA when complexed with a guide RNA (gRNA).

[0021] In some embodiments, the circularly permuted napDNA/RNAbp is a circularly permuted Cas9 that is circularly permuted at any one of amino acid residue numbers 1000 to 1350 of S. pyogenes Cas9 (SpCas9) having the amino acid sequence SEQ ID NO: 1, or at any one of the corresponding amino acid residue numbers in another Cas9.

[0022] In some embodiments, the circularly permuted napDNA/RNAbp is a circularly permuted Cas9 that is circularly permuted at any one of amino acid residue numbers 1012 to 1249 of a Cas9, or a variant thereof, that is capable of binding DNA when complexed with a guide RNA (gRNA).

[0023] In some embodiments, the circularly permuted napDNA/RNAbp is a circularly permuted Cas9 that is circularly permuted at any one of amino acid residue numbers 1012 to 1249 of S. pyogenes Cas9 (SpCas9) having the amino acid sequence SEQ ID NO:1, or at any one of the corresponding amino acid residue numbers in another Cas9.

[0024] In some embodiments, the circularly permuted napDNA/RNAbp is a circularly permuted Cas9 that is circularly permuted at any one of amino acid residue numbers 1012, 1028, 1041, 1249, or 1300 of S. pyogenes Cas9 (SpCas9) having the amino acid sequence SEQ ID NO: 1, or at any one of the corresponding amino acid residue numbers in another Cas9.

[0025] In some embodiments, the circularly permuted napDNA/RNAbp is a circularly permuted Cas9 derived from a S. pyogenes Cas9 (SpCas9), a S. aureus Cas9 (SaCas9), or a variant thereof, that is capable of binding DNA when complexed with a guide RNA (gRNA).

[0026] In some embodiments, the variant of the SpCas9 is SpCas9-VQR or SpCas9-VRER.

[0027] In some embodiments, the variant of the SaCas9 is SaCas9-KKH.

[0028] In some embodiments, the circularly permuted napDNA/RNAbp is derived from a Cas9 comprising an amino acid sequence that is at least 80%, 85%, 90%, 95%, 98%, 99%, or 99% identical to any one of SEQ ID NOs: 1-4.

[0029] In some embodiments, the circularly permuted napDNA/RNAbp is derived from a Cas9 comprising the amino acid sequence of any one of SEQ ID NOs: 1-4.

[0030] In some embodiments, the circularly permuted napDNA/RNAbp comprises an amino acid sequence that is at least 80%, 85%, 90%, 95%, 98%, 99%, or 99% identical to any one of the CP-Cas9 sequences contained in any one of the following fusion proteins: SEQ ID NOs: 69-81.

[0031] In some embodiments, the nucleic acid effector domain is a deaminase domain.

[0032] In some embodiments, the deaminase domain is a cytidine deaminase domain.

[0033] In some embodiments, the cytidine deaminase is a deaminase from the apolipoprotein B mRNA-editing complex (APOBEC) family deaminase.

[0034] In some embodiments, the cytidine deaminase comprises an amino acid sequence that is at least 80%, 85%, 90%, 95%, 98%, or 99% identical to the amino acid sequence of:

(SEQ ID NO: 117)
SSETGPVAVDPTLRRRIEPHEFEVFFDPRELRKETCLLYEINWGGRHSIWR
HTSQNTNKHVEVNFIEKFTTERYFCPNTRCSITWFLSWSPCGECSRAITEF
LSRYPHVTLFIYIARLYHHADPRNRQGLRDLISSGVTIQIMTEQESGYCWR
NFVNYSPSNEAHWPRYPHLWVRLYVLELYCIILGLPPCLNILRRKQPQLTF
FTIALQSCHYQRLPPHILWATGLK.

[0035] In some embodiments, the cytidine deaminase domain comprises an amino acid sequence that is at least 80%, 85%, 90%, 95%, 98%, or 99% identical to the amino acid sequence of any one of SEQ ID NOs: 9-43.

[0036] In some embodiments, the fusion protein further comprises one or more UGI domains.

[0037] In some embodiments, the fusion protein comprises two UGI domains.

[0038] In some embodiments, the one or more UGI domains comprise an amino acid sequence that is at least 80%, 85%, 90%, 95%, 98%, or 99% identical to the amino acid sequence of

(SEQ ID NO: 118)
TNLSDIIEKETGKQLVIQESILMLPEEVEEVIGNKPESDILVHTAYDESTD
ENVMLLTSDAPEYKPWALVIQDSNGENKIKML.

[0039] In some embodiments, the one or more UGI domains comprise the amino acid sequence of SEQ ID NO: 118.

[0040] Some embodiments further have one or more nuclear localization sequences.

[0041] In some embodiments, at least one of the one or more nuclear localization sequences is a bipartite nuclear localization sequence.

[0042] In some embodiments, one or more of the nuclear localization sequences comprises the amino acid sequence KRTADGSEFESPKKKRKV (SEQ ID NO: 84) or KRTADGSEFEPKKKRKV (SEQ ID NO: 85).

[0043] In some embodiments, the fusion protein comprises the structure: NH₂-[first nuclear localization sequence]-[cytidine deaminase domain]-[circularly permuted napDNA/RNAbp]-[first UGI domain]-[second UGI domain]-[second nuclear localization sequence]-COOH, wherein each instance of “-” comprises an optional linker.

[0044] In some embodiments, the cytidine deaminase domain and the circularly permuted napDNA/RNAbp are linked via a linker comprising the amino acid sequence SGGSSGGSSGSETPGTSESATPESSGGSSGGS (SEQ ID NO: 113); the circularly permuted napDNA/RNAbp and the first UGI domain are linked via a linker comprising the amino acid sequence of SGGSGGSGGS (SEQ ID NO: 114); the first UGI domain and the second UGI domain are linked via a linker comprising the amino acid sequence of SGGSGGSGGS (SEQ ID NO: 114); and/or the second UGI domain and the second nuclear localization sequence are linked via a linker comprising the amino acid sequence of SGGS (SEQ ID NO: 115).

[0045] In some embodiments, the fusion protein comprises an amino acid sequence that is at least 80%, 85%, 90%, 95%, 98%, or 99% identical to the amino acid sequence of SEQ ID NO: 66-81. In other embodiments, the fusion protein comprises the amino acid sequence of SEQ ID NO: 66-81. In still other embodiments, the nucleic acid effector domain comprises a first adenosine deaminase.

[0046] In some embodiments, the first adenosine deaminase is capable of deaminating adenine in deoxyribonucleic acid (DNA). In other embodiments, the first adenosine deaminase is a TadA adenosine deaminase.

[0047] In some embodiments, the first adenosine deaminase comprises an amino acid sequence that is at least 80%, 85%, 90%, 95%, 98%, or 99% identical to the amino acid sequence of SEQ ID NO: 44-65.

[0048] In some embodiments, the first adenosine deaminase comprises an amino acid sequence that is at least 90% identical to any one of the amino acid sequences of SEQ ID NOs: 44 with the exception of one or more substitutions at positions selected from the group consisting of amino acid residues corresponding to positions 8, 17, 18, 23, 34, 36, 45, 48, 51, 56, 59, 84, 85, 94, 95, 102, 104, 106, 107, 108, 110, 118, 123, 127, 138, 142, 146, 147, 149, 151, 152, 153, 154, 155, 156, and 157 of the amino acid sequence of SEQ ID NO: 44-65 wherein said first adenosine deaminase deaminates adenine in deoxyribonucleic acid (DNA).

[0049] In some embodiments, the first adenosine deaminase comprises the amino acid sequence of SEQ ID NO: 44 with the exception of the one or more substitutions at positions selected from the group consisting of amino acid residues corresponding to positions 8, 17, 18, 23, 34, 36, 45, 48, 51, 56, 59, 84, 85, 94, 95, 102, 104, 106, 107, 108, 110, 118, 123, 127, 138, 142, 146, 147, 149, 151, 152, 153, 154, 155, 156, and 157 of the amino acid sequence of SEQ ID NO: 44-65.

[0050] In some embodiments, said one or more substitutions are at positions selected from the group consisting of amino acid residues corresponding to positions 23, 36, 48, 51, 84, 106, 108, 123, 142, 146, 147, 152, 155, 156, and 157 of the amino acid sequence of SEQ ID NO: 45.

[0051] In some embodiments, said one or more substitutions are substitutions selected from the group consisting of W23R, W23L, H36L, P48S, P48A, R51L, L84F, A106V, D108N, H123Y, A142N, S146C, D147Y, R152P, E155V, I156F, and K157N of the amino acid sequence of SEQ ID NO: 45.

[0052] In some embodiments, said one or more substitutions comprise a group of substitutions at positions selected from the group of substitutions at positions consisting of: (i) W23, H36, P48, R51, L84, A106, D108, H123, A142, S146, D147, R152, E155, 1156, and K157; (ii) W23, H36, P48, R51, L84, A106, D108, H123, S146, D147, R152, E155, 1156, and K157; (iii) H36, P48, R51, L84, A106, D108, H123, A142, S146, D147, E155, 1156, and K157; (iv) H36, P48, R51, L84, A106, D108, H123, S146, D147, E155, 1156, and K157; (v) H36, R51, L84, A106, D108, H123, S146, D147, E155, I156, and K157; (vi) L84, A106, D108, H123, D147, E155, and 1156; (vii) A106, D108, D147, and E155; (viii) A106, and D108; and (ix) D108; of the amino acid sequence of SEQ ID NO: 45.

[0053] In some embodiments, said one or more substitutions comprise a group of substitutions selected from the groups of substitutions consisting of: (i) W23L, H36L, P48A, R51L, L84F, A106V, D108N, H123Y, A142N, S146C, D147Y, R152P, E155V, I156F, and K157N; (ii) W23R, H36L, P48A, R51L, L84F, A106V, D108N, H123Y, S146C, D147Y, R152P, E155V, I156F, and K157N; (iii) H36L, P48S, R51L, L84F, A106V, D108N, H123Y, A142N, S146C, D147Y, E155V, I156F, and K157N; (iv) H36L, P48S, R51L, L84F, A106V, D108N, H123Y, S146C, D147Y, E155V, I156F, and K157N; (v) H36L, R51L, L84F, A106V, D108N, H123Y, S146C, D147Y, E155V, I156F, and K157N; (vi) L84F, A106V, D108N, H123Y, D147Y, E155V, and I156F; (vii) A106V, D108N, D147Y, and E155V; (viii) A106V, and D108N; and (ix) D108N; of the amino acid sequence of SEQ ID NO: 44.

[0054] Some embodiments further have a second adenosine deaminase.

[0055] In some embodiments, said second adenosine deaminase is a TadA adenosine deaminase.

[0056] In some embodiments, said second adenosine deaminase comprises an amino acid sequence that is at least 90% identical to the amino acid sequence:

(SEQ ID NO: 44)
MSEVEFSHEYWMRHALTLAKRAWDEREVPVGAVLVHNNRVIGEGWNRPIGR
HDPTAHAEIMALRQGGLVMQNYRLIDATLYVTLEPCVMCAGAMIHSRIGRV
VFGARDAKTGAAGSLMDVLHHPGMNHRVEITEGILADECAALLSDFFRMRR
QEIKAQKKAQSSTD.

[0057] In some embodiments, said second adenosine deaminase comprises the amino acid sequence of SEQ ID NO: 44.

[0058] In some embodiments, the first adenosine deaminase comprises the amino acid sequence of SEQ ID NO: 44 with the exception of one or more substitutions selected from the group consisting of W23R, H36L, P48A, R51L, L84F, A106V, D108N, H123Y, S146C, D147Y, R152P, E155V, I156F, and K157N of the amino acid sequence of SEQ ID NO: 44.

[0059] In some embodiments, the first adenosine deaminase comprises the amino acid sequence:

(SEQ ID NO: 119)
SEVEFSHEYWMRHALTLAKRARDEREVPVGAVLVLNNRVIGEGWNRAIGLH
DPTAHAEIMALRQGGLVMQNYRLIDATLYVTFEPCVMCAGAMIHSRIGRVV
FGVRNAKTGAAGSLMDVLHYPGMNHRVEITEGILADECAALLCYFFRMPRQ
VFNAQKKAQSSTD.

[0060] Some embodiments further have one or more nuclear localization sequences.

[0061] In some embodiments, at least one of the one or more nuclear localization sequences is a bipartite nuclear localization sequence.

[0062] In some embodiments, one or more of the nuclear localization sequences comprises the amino acid sequence KRTADGSEFESPKKKRKV (SEQ ID NO: 84) or KRTADGSEFEPKKKRKV (SEQ ID NO: 85).

[0063] In some embodiments, the fusion protein comprises the structure: NH₂-[first nuclear localization sequence]-[first adenosine deaminase]-[second adenosine deaminase]-[circularly permuted napDNA/RNAbp]-[second nuclear localization sequence]-COOH, wherein each instance of “-” comprises an optional linker.

[0064] In some embodiments, the first adenosine deaminase and the second adenosine deaminase are linked via a linker comprising the amino acid sequence of SEQ ID NO: 105-115 and the second adenosine deaminase and Cas9 domain are linked via a linker comprising the amino acid sequence of SEQ ID NO: 105-115.

[0065] In some embodiments, the fusion protein comprises an amino acid sequence that is at least 80%, 85%, 90%, 95%, 98%, or 99% identical to the amino acid sequence of SEQ ID NO: 66-81.

[0066] In some embodiments, the fusion protein comprises the amino acid sequence of SEQ ID NO: 66-81.

[0067] In some aspects, the disclosure provides a nucleic acid sequence that encodes the fusion protein of any one of the previous embodiments. In other aspects, the disclosure provides a vector comprising the nucleic acid of the previous embodiment. In still other embodiments, the vector comprises a heterologous promoter driving expression of the nucleic acid. In still other aspects, the disclosure provides a complex comprising the fusion protein of any one of the previous embodiments and an RNA bound to the circularly permuted napDNA/RNAbp.

[0068] In some embodiments, the RNA is a guide RNA (gRNA). The guide RNA can be a single guide RNA (sgRNA).

[0069] In some embodiments, the gRNA comprises the backbone sequence of 5′-GUUUUAGAGCUAGAAAUAGCAAGUUAAAAUAAGGCUAGUCCGU-3′ SEQ ID NO: 120.

[0070] In some embodiments, the RNA is from 10-100 nucleotides long and comprises a sequence of at least 10 contiguous nucleotides that is complementary to a target sequence.

[0071] In some embodiments, the RNA comprises a sequence of 10, 11, 12, 13, 14, 15, 16, 17, 18, 19, 20, 21, 22, 23, 24, 25, 26, 27, 28, 29, 30, 31, 32, 33, 34, 35, 36, 37, 38, 39, or 40 contiguous nucleotides that is complementary to a target sequence.

[0072] In some embodiments, the target sequence is a DNA sequence, e.g., the genome of an organism, which can be a prokaryote, eukaryote, vertebrate, mammal, or human.

[0073] In some aspects, the disclosure provides a cell comprising the fusion protein of any one of the previous embodiments.

[0074] In some aspects, the disclosure provides a cell comprising the nucleic acid of the previous embodiment.

[0075] In some aspects, the disclosure provides a cell comprising the vector of the previous embodiments.

[0076] In some aspects, the disclosure provides a cell comprising the complex of any one of the previous embodiments.

[0077] In some aspects, the disclosure provides a method comprising contacting a nucleic acid molecule with the complex of any one of the previous embodiments.

[0078] In some embodiments, the nucleic acid is DNA, which can be double-stranded DNA.

[0079] In some embodiments, the nucleic acid comprises a target sequence associated with a disease or disorder and can include a point mutation associate with that disease or disorder.

[0080] In some embodiments, the target sequence comprises a T to C point mutation associated with a disease or disorder, and the deamination of the mutant C base results in a sequence that is not associated with a disease or disorder.

[0081] In some embodiments, the target sequence comprises a G to A point mutation associated with a disease or disorder, and wherein the deamination of the mutant A base results in a sequence that is not associated with a disease or disorder.

[0082] In some embodiments, the target sequence encodes a protein, and the point mutation is in a codon and results in a change in the amino acid encoded by the mutant codon as compared to a wild-type codon.

[0083] In some embodiments, the target sequence is at a splice site, and the point mutation results in a change in the splicing of an mRNA transcript as compared to a wild-type transcript.

[0084] In some embodiments, the target sequence is in a promoter of a gene, and the point mutation results in increased expression of the gene.

[0085] In some embodiments, the target sequence is in a promoter of a gene, and the point mutation results in decreased expression of the gene.

[0086] In some embodiments, the deamination of the mutant C or the mutant A results in a change of the amino acid encoded by the mutant codon.

[0087] In some embodiments, the deamination of the mutant C or the mutant A results in the codon encoding a wild-type amino acid.

[0088] In some embodiments, the deamination of the mutant C or the mutant A results in a change of the mRNA transcript.

[0089] In some embodiments, the deamination of the mutant C or the mutant A results in a wild-type mRNA transcript.

[0090] In some embodiments, the deamination of the mutant C or the mutant A results in increased expression of the gene.

[0091] In some embodiments, the deamination of the mutant C or the mutant A results in decreased expression of the gene.

[0092] In some embodiments, the contacting is performed in vitro.

[0093] In some embodiments, the contacting is performed in vivo in a subject.

[0094] In some embodiments, the subject has been diagnosed with a disease or disorder.

[0095] In some aspects, the disclosure provides a method of modifying one or more nucleotides within a protospacer sequence, the method comprising: (i) contacting a double stranded DNA molecule with a base editor, wherein the base editor is bound to a guide RNA, thereby generating a portion of single-stranded DNA that comprises the protospacer sequence, wherein the base editor comprises a circularly permuted nucleic acid programmable binding protein (napDNA/RNAbp); and (ii) modifying one or more nucleotides within the protospacer sequence.

[0096] In some embodiments, the base editor modifies one or more nucleotides within a window of 10 nucleotides of the protospacer sequence.

[0097] In some embodiments, the base editor modifies one or more nucleotides within a window of 8 nucleotides of the protospacer sequence.

[0098] In some embodiments, the base editor modifies one or more nucleotides from positions 4-11 of the protospacer sequence.

[0099] In some embodiments, the base editor modifies one or more nucleotides at positions 4, 5, 6, 7, 8, 9, 10, and/or 11 of the protospacer sequence.

[0100] In some embodiments, the protospacer sequence is 5, 6, 7, 8, 9, 10, 11, 12, 13, 14, 15, 16, 17, 18, 19, 20, 21, 22, 23, 24, 25, 26, 27, 28, 29, or 30 nucleotides in length.

[0101] In some embodiments, 1, 2, 3, 4, 5, 6, 7, or 8 nucleotides of the protospacer sequence are modified.

[0102] In some embodiments, only one nucleotide of the protospacer sequence is modified.

[0103] In some embodiments, the base editor comprises the fusion protein of any one of the previous embodiments.

[0104] In some embodiments, the double stranded DNA molecule comprises a protospacer-adjacent motif (PAM) that comprises the sequence NGG, NGA, NGCG, NNGRRT, or NNNRRT.

[0105] In some aspects, the disclosure provides a method of modifying one or more nucleotides outside of a protospacer sequence, the method comprising: (i) contacting a double stranded DNA molecule with a base editor, wherein the base editor is bound to a guide RNA, thereby generating a portion of single-stranded DNA that comprises the protospacer sequence, wherein the base editor comprises a circularly permuted nucleic acid programmable binding protein (napDNA/RNAbp); and (ii) modifying one or more nucleotides outside of the protospacer sequence.

[0106] In some embodiments, step (ii) comprises modifying one or more nucleotides upstream of the protospacer sequence.

[0107] In some embodiments, step (ii) comprises modifying one or more nucleotides from 1 to 15 nucleotides upstream of the protospacer sequence.

[0108] In some embodiments, one or more nucleotides upstream of the protospacer on the protospacer strand are modified.

[0109] In some embodiments, one or more nucleotides upstream of the protospacer on the non-protospacer strand are modified.

[0110] In some embodiments, 1, 2, 3, 4, 5, 6, 7, 8, 9, or 10 nucleotides outside of the protospacer sequence are modified.

[0111] In some embodiments, only one nucleotide outside of the protospacer sequence is modified.

[0112] In some embodiments, the base editor comprises the fusion protein of any one of the previous embodiments.

[0113] In some embodiments, the double stranded DNA molecule comprises a protospacer-adjacent motif (PAM) that comprises the sequence NGG, NGA, NGCG, NNGRRT, or NNNRRT.

[0114] In some embodiments, the method results in less than 5%, less than 4%, less than 3%, less than 2%, less than 1%, or less than 0.5% byproducts.

[0115] In some embodiments, the byproducts comprise off-target mutations.

[0116] In some embodiments, the byproducts comprise unintended mutations.

[0117] In some embodiments, the unintended mutations are selected from the group consisting of a C to G mutation, a C to A mutation, an A to C mutation, or an A to T mutation.

[0118] In some embodiments, the method results in less than 5%, less than 4%, less than 3%, less than 2%, less than 1%, or less than 0.5% indels.

[0119] In some aspects, the disclosure provides a pharmaceutical composition comprising the fusion protein of any one of the previous embodiments.

[0120] In some aspects, the disclosure provides a pharmaceutical composition comprising the complex of any one of the previous embodiments.

[0121] In some aspects, the disclosure provides a pharmaceutical composition comprising the nucleic acid of the previous embodiments.

[0122] In some aspects, the disclosure provides a pharmaceutical composition comprising the vector of the previous embodiments.

[0123] Some embodiments have a pharmaceutically acceptable excipient.

[0124] Some embodiments further have a lipid.

[0125] In some embodiments, the lipid is a cationic lipid.

[0126] In some aspects, the disclosure provides a circularly permuted nucleic acid programmable DNA/RNA binding protein (napDNA/RNAbp).

[0127] In some embodiments, the circularly permuted napDNA/RNAbp is a nuclease, a nickase, or is nuclease inactive.

[0128] In some embodiments, the circularly permuted napDNA/RNAbp is a circularly permuted Cas9, or a variant thereof, that is capable of binding DNA or RNA when complexed with a guide RNA (gRNA).

[0129] In some embodiments, the circularly permuted napDNA/RNAbp is a circularly permuted nuclease active Cas9, a circularly permuted Cas9 nickase (Cas9n), a circularly permuted nuclease inactive Cas9 (Cas9d), or a variant thereof, that is capable of binding DNA or RNA when complexed with a guide RNA (gRNA).

[0130] In some embodiments, the N-terminus of the circularly permuted Cas9 is closer in proximity to a single stranded DNA (ssDNA) loop that is formed in a double stranded DNA molecule when the gRNA complexed with the circularly permuted Cas9 binds to a strand of the double stranded DNA molecule, as compared to a corresponding non-circularly permuted Cas9, optionally wherein the corresponding non-circularly permuted Cas9 is a wild-type Cas9, or a variant thereof, that is capable of binding DNA when complexed with a guide RNA (gRNA).

[0131] In some embodiments, the circularly permuted napDNA/RNAbp is a circularly permuted Cas9 that is circularly permuted at any one of amino acid residue numbers 1000 to 1350 of a Cas9, or a variant thereof, that is capable of binding DNA when complexed with a guide RNA (gRNA).

[0132] In some embodiments, the circularly permuted napDNA/RNAbp is a circularly permuted Cas9 that is circularly permuted at any one of amino acid residue numbers 1000 to 1350 of S. pyogenes Cas9 (SpCas9) having the amino acid sequence SEQ ID NO: 1, or at any one of the corresponding amino acid residue numbers in another Cas9.

[0133] In some embodiments, the circularly permuted napDNA/RNAbp is a circularly permuted Cas9 that is circularly permuted at any one of amino acid residue numbers 1012 to 1249 of a Cas9, or a variant thereof, that is capable of binding DNA when complexed with a guide RNA (gRNA).

[0134] In some embodiments, the circularly permuted napDNA/RNAbp is a circularly permuted Cas9 that is circularly permuted at any one of amino acid residue numbers 1012 to 1249 of S. pyogenes Cas9 (SpCas9) having the amino acid sequence SEQ ID NO: 1, or at any one of the corresponding amino acid residue numbers in another Cas9.

[0135] In some embodiments, the circularly permuted napDNA/RNAbp is a circularly permuted Cas9 that is circularly permuted at any one of amino acid residue numbers 1012, 1028, 1041, 1249, or 1300 of S. pyogenes Cas9 (SpCas9) having the amino acid sequence SEQ ID NO: 1, or at any one of the corresponding amino acid residue numbers in another Cas9.

[0136] In some embodiments, the circularly permuted napDNA/RNAbp is a circularly permuted Cas9 derived from a S. pyogenes Cas9 (SpCas9), a S. aureus Cas9 (SaCas9), or a variant thereof, that is capable of binding DNA when complexed with a guide RNA (gRNA).

[0137] In some embodiments, the variant of the SpCas9 is SpCas9-VQR or SpCas9-VRER.

[0138] In some embodiments, the variant of the SaCas9 is SaCas9-KKH.

[0139] In some embodiments, the circularly permuted napDNA/RNAbp is derived from a Cas9 comprising an amino acid sequence that is at least 80%, 85%, 90%, 95%, 98%, 99%, or 99% identical to any one of SEQ ID NOs: 1-4.

[0140] In some embodiments, the circularly permuted napDNA/RNAbp is derived from a Cas9 comprising the amino acid sequence of any one of SEQ ID NOs: 1-4.

[0141] In some embodiments, the circularly permuted napDNA/RNAbp comprises an amino acid sequence that is at least 80%, 85%, 90%, 95%, 98%, 99%, or 99% identical to any one of CP1012, CP1028, CP1041, CP1249, and CP1300.

[0142] In some embodiments, the circularly permuted napDNA/RNAbp comprises the amino acid sequence of any one of CP1012, CP1028, CP1041, CP1249, and CP1300.

[0143] In some aspects, the disclosure provides a kit comprising a nucleic acid construct, comprising (a) a nucleic acid sequence encoding the fusion protein of any one of claims 1-58; and (b) a heterologous promoter that drives expression of the sequence of (a).

[0144] In some aspects, the disclosure provides a kit comprising a nucleic acid construct, comprising (a) a nucleic acid sequence encoding the circularly permuted napDNA/RNAbp of any one of the previous embodiments; and (b) a heterologous promoter that drives expression of the sequence of (a).

[0145] In some embodiments, the nucleic acid construct further comprises (c) a cloning site positioned to allow the cloning of a nucleic acid sequence identical or complementary to a target sequence into a guide RNA backbone.

[0146] Some embodiments have a second heterologous promoter that drives expression of the guide RNA backbone of (c).

[0147] Some embodiments further have an expression construct encoding a guide RNA backbone, wherein the construct comprises a cloning site positioned to allow the cloning of a nucleic acid sequence identical or complementary to a target sequence into the guide RNA backbone.

### BRIEF DESCRIPTION OF THE DRAWINGS

[0148] FIGS. 1A-1H show that Cas9 PAM-variant ABe orthologs mediate A⋅T-to-G⋅C conversion in human cells. FIG. 1A shows optimized WP_010922251 architecture23 used for PAM-variant construction. TadA*, evolved TadA; aa, amino acid. FIG. 1B shows base editing in HEK293T cells by ABEmax, VRQR-ABEmax, xABEmax and NG-ABEmax at six genomic sites containing an NGA PAM. FIG. 1C shows base editing in HEK293T cells by ABEmax, VRER-ABEmax, VRQR-ABEmax, xABEmax and NG-ABEmax at six genomic sites containing an NGCG PAM. FIG. 1D illustrates heat maps showing average editing efficiency by SpCas9-derived ABE max variants at each protospacer position across sites containing each PAM listed (n=6). Spaces crossed out indicate a position for which no target base was present among all of the genomic sites tested. FIG. 1E shows base editing in HEK293T cells by ABEmax, VRQR-ABEmax, xABEmax and NG-ABEmax at three genomic sites (PAMs: GAT, CGCC, TGCC). FIG. 1F, Base editing in HEK293T cells by SaABEmax and SaKKH-ABEmax at six genomic sites containing an NNGRRT PAM. FIG. 1G shows base editing in HEK293T cells by SaABEmax and SaKKH-ABEmax at six genomic sites containing an NNHRRT PAM.

[0149] FIG. 1H illustrates heat maps showing average editing efficiency by SaCas9-derived ABEmax variants at each protospacer position across sites containing each PAM listed (n=6). Subscripted numbers indicate protospacer positions, counting the first base of the PAM as position 21. Values and error bars reflect the mean±s.d. of three independent biological replicates performed by different researchers on different days.

[0150] FIGS. 2A-2G show that CP-Cas9 variants are compatible with the CBe and ABe architectures and exhibit broadened editing windows. FIG. 2A shows two views of the SpCas9:sgRNA:DNA crystal structure (PDB: 5F9R³⁶) showing the location of the N and C termini in the wild-type protein (black) and in CP variants tested in this work (red, yellow, green, blue and magenta). The DNA strand paired with the guide RNA is shown in light green and the other strand, targeted for base editing and partially disordered in the structure, is shown in dark green. FIG. 2B shows schematic representations of CP-Cas9 variants tested in this work, numbered to indicate the original SpCas9 amino acid that serves as the CP N terminus. FIG. 2C shows base editing in HEK293T cells by CP-CBEmax variants across five genomic sites. FIG. 2D shows base editing in HEK293T cells by CP-ABEmax variants across five genomic sites. For clarity, in c and d, protospacer positions with editing lower than 0.5% across all editors are not shown. CP1300 data are shown in FIGS. 6A-6B. FIGS. 2E, 2F illustrate heat maps showing average base-editing efficiency at each position within the protospacer across five sites tested with CP-CBEmax variants (FIG. 2E) or CP-ABEmax variants (FIG. 2F), normalized to the maximum observed editing within the protospacer (1.0). Boxes crossed out indicate positions for which no target base was present among all genomic sites tested. FIG. 2G shows the product distribution among edited DNA sequencing reads (reads in which the target C is base edited) is shown for each CP-CBEmax variant tested at two different genomic sites that are especially prone to non-C-to-T byproduct formation. Subscripted numbers indicate protospacer positions, counting the first base of the PAM as position 21. Values and error bars reflect the mean±s.d. of three biological replicates performed on different days at each site. *P<0.05; **P<0.01; ***P<0.001, by two-tailed Student's t-test.

[0151] FIGS. 3A-3C show indel frequencies for ABE PAM variants at six NGA PAM sites, six NGCG PAM sites, or three other PAM sites. FIG. 3A shows the percent of all sequencing reads containing an indel following modification by VRQR-ABEmax, xABEmax, ABEmax, or NG-ABEmax at six genomic sites containing an NGA PAM in HEK293T cells. FIG. 3B shows the pPercent of all sequencing reads containing an indel following modification by VRQR-ABEmax, VRER-ABEmax, xABEmax, ABEmax, or NG-ABEmax at six genomic sites containing an NGCG PAM in HEK293T cells. FIG. 3C shows the percent of all sequencing reads containing an indel following modification by VRQR-ABEmax, xABEmax, ABEmax, or NG-ABEmax at three genomic sites (PAM: GAT, CGCC, TGCC) in HEK293T cells. Values and error bars reflect the mean±s.d. of three independent biological replicates performed by different researchers on different days.

[0152] FIGS. 4A-4B show peak editing position and indel frequencies for SaABEmax and SaKKH-ABEmax at six NNGRRT or six NNHRRT PAM sites. FIG. 4A shows the percent of all sequencing reads containing an indel following modification by SaABEmax or SaKKH-ABEmax at six genomic sites containing an NNGRRT PAM (top). FIG. 4A also shows a representative sample of the top two allelic outcomes at six genomic sites containing NNGRRT PAMs following modification with SaABEmax (n=1 shown) in HEK293T cells (bottom). The top allelic outcome is the unmodified amplicon, followed by the most common editing outcome being a single A-to-G conversion (4 out of 6 sites) within a shifted window (protospacer positions 7-11) FIG. 4B shows the percent of all sequencing reads containing an indel following modification by SaABEmax or SaKKH-ABEmax at six genomic sites containing an NNHRRT PAM (where H=A, C, or T). Sequences correspond from top to bottom to SEQ ID NOs: 121-138. FIG. 4B also showsa representative sample of the top two allelic outcomes at six genomic sites containing NNHRRT PAMs following modification with SaKKH-ABEmax (n=1 shown) in HEK293T cells (bottom). The top allelic outcome is the unmodified amplicon, followed by the most common editing outcome being a single A-to-G conversion (5 out of 6 sites) within a shifted window (protospacer positions 7-11). Values and error bars reflect the mean±s.d. of three independent biological replicates performed by different researchers on different days. Sequences correspond from top to bottom to SEQ ID NOs: 139-156.

[0153] FIGS. 5A-5B show indel frequencies for CP1300-CBEmax and CP1300-ABEmax at five genomic sites. FIG. 5A shows the percent of all sequencing reads containing an indel following modification by CP-CBEmax variants compared to CBEmax at five genomic sites containing a variety of adenines and cytosines in HEK293T cells. FIG. 5B shows the percent of all sequencing reads containing an indel following modification by CP-ABEmax variants compared to ABEmax at five genomic sites containing a variety of adenines and cytosines in HEK293T cells. Values and error bars reflect the mean±s.d. of three independent biological replicates performed by different researchers on different days.

[0154] FIGS. 6A-6B show the base editing frequency for CP1300-CBEmax and CP1300-ABEmax at five genomic sites containing adenines and cytosines. Base editing with CP1300-CBEmax (FIG. 6A) and CP1300-ABEmax (FIG. 6B) at five genomic sites containing a variety of adenines and cytosines in HEK293T cells. Nucleobase conversion is highly site dependent, with minimal activity at most of the five genomic sites tested. Values and error bars reflect the mean±s.d. of three independent biological replicates performed by different researchers on different days.

[0155] FIG. 7 shows the out-of-protospacer C⋅G-to-T⋅A conversion by CP1012-CBEmax, CP1028-CBEmax, and CP1041-CBEmax variants. Three of the five genomic sites treated with CP-CBEmax variants exhibited both nontarget strand editing and out-of-protospacer editing. Representative samples of three sites are shown, with the protospacer designated by the grey box, and out-of-protospacer C G-to-T A conversion highlighted in the red box. CP1012-CBEmax exhibited the most frequent out-of-protospacer editing, with CP1028-CBEmax and CP1041-CBEmax exhibiting this property on only one of the sites. Sequences correspond from left to right and top to bottom to SEQ ID NOs: 157-159.

[0156] FIGS. 8A-8C show the predicted average minimum distance between original or new C-termini and the ssDNA substrate for base editing. FIG. 8A shows the crystal structure of the SpCas9:gRNA:DNA ternary complex with the ssDNA bubble partially resolved (PDB: 5F9R)³⁶. Novel CP termini are represented as spheres (original N- and C-termini in dark grey). The minimal linear distance between the predicted position of the novel CP termini (and WT C-terminus) and the furthest resolved nucleobase in the ssDNA bubble (corresponding to protospacer position 12, counting the PAM as positions 21-23) is depicted. FIG. 8B shows the Cryo-EM structure of the SpCas9:gRNA:DNA ternary complex with the ssDNA bubble fully resolved (PDB: 5Y36)³⁸. Novel CP termini are represented as spheres (original N- and C-termini in dark grey). The minimal linear distance between the predicted position of the novel CP termini (and WT C-terminus) and a protospacer position typically targeted for base editing (corresponding to protospacer position 4) is depicted. FIG. 8C shows the average of the distances to two different target positions on the ssDNA substrate measured for the novel CP termini (or WT C-terminus) from (FIG. 8A) and (FIG. 8B), listed in ascending order.

[0157] FIG. 9 shows the edited product distribution for CP-CBEmax-B variants at two genomic sites prone to non-C-to-T byproduct formation. The product distribution among edited DNA sequencing reads (reads in which the target C is base edited) is shown for each CBEmax variant with no UGI (“CBEmax-B” variants) tested at the same two sites as in FIG. 2G. Subscripted numbers indicate protospacer positions, counting the first base of the PAM as position 21. Values and error bars reflect the mean±s.d. of three biological replicates performed on different days at each site. ns, P>0.05; *P<0.05; **P<0.01; ***P<0.001, by two tailed Student's t-test.

[0158] FIGS. 10A-10B show ClinVar analysis of targetable human pathogenic SNPs with expanded editing window CP-CBEmax and CP-ABEmax variants. FIG. 10A shows the fraction of pathogenic T⋅A-to-C⋅G to SNPs in ClinVar^{17,18} that could, in principle, be corrected by CBEmax with an editing window of positions 4-8 (left) versus the SNPs correctable by CP-CBEmax with an editing window of positions 4-14 (right). FIG. 10B shows the fraction of G⋅C-to-A⋅T pathogenic SNPs in ClinVar that could, in principle, be corrected by ABEmax with an editing window of positions 4-8 (left) versus the SNPs correctable by CP-ABEmax with an editing window of positions 4-14 (right).

[0159] FIGS. 11A-11B show unpaired two tailed Student's t-test p-values, t-values, and degrees of freedom for product purity comparisons. FIG. 11A shows unpaired two tailed Student's t-test p-values, t-values, and degrees of freedom (df) comparing CBEmax and CP-CBEmax variants at two genomic sites prone to non-C-to-T byproduct formation.

[0160] FIG. 11B shows unpaired two tailed Student's t-test p-values, t-values, and degrees of freedom (df) comparing CBEmax-B and CP-CBEmax-B variants at two genomic sites prone to non-C-to-T byproduct formation. Values and error bars reflect the mean±s.d. of three biological replicates performed on different days at each site. ns, P>0.05; *P<0.05; **P<0.01; ***P<0.001.

[0161] FIG. 12 shows activities of CP-CBEmax variants versus CBEmax at the HEK2 on-target and off-target sites previously characterized for S. pyogenes Cas9 nuclease. Sequences correspond from top to bottom to SEQ ID NOs: 160-162.

[0162] FIG. 13 shows activities of CP-ABEmax variants versus ABEmax at the HEK2 on-target and off-target sites previously characterized for S. pyogenes Cas9 nuclease. Sequences correspond from top to bottom to SEQ ID NOs: 163-165.

[0163] FIG. 14 shows activities of CP-CBEmax variants versus CBEmax at the EMX1 on-target and off-target sites previously characterized for S. pyogenes Cas9 nuclease. Sequences correspond from top to bottom to SEQ ID NOs: 166-169.

[0164] FIG. 15 shows activities of CP-ABEmax variants versus ABEmax at the EMX1 on-target and off-target sites previously characterized for S. pyogenes Cas9 nuclease. Sequences correspond from top to bottom to SEQ ID NOs: 170-173.

[0165] FIG. 16 shows activities of CP-CBEmax variants versus CBEmax at the HEK4 on-target and off-target sites previously characterized for S. pyogenes Cas9 nuclease. Sequences correspond from top to bottom to SEQ ID NOs: 174-178.

[0166] FIG. 17 shows activities of CP-ABEmax variants versus ABEmax at the HEK4 on-target and off-target sites previously characterized for S. pyogenes Cas9 nuclease. Sequences correspond from top to bottom to SEQ ID NOs: 179-183.

[0167] FIG. 18A shows the amino acid sequence of an improved adenosine base editor described herein, VRQR-ABEmax. The sequences corresponds to SEQ ID NO: 184.

[0168] FIG. 18B shows the amino acid sequence of an improved adenosine base editor described herein, xABEmax. The sequences corresponds to SEQ ID NO: 185.

[0169] FIG. 18C shows the amino acid sequence of an improved adenosine base editor described herein, VRER-ABEmax. The sequences corresponds to SEQ ID NO: 186.

[0170] FIG. 18D shows the amino acid sequence of an improved adenosine base editor described herein, SaABEmax. The sequences corresponds to SEQ ID NO: 187.

[0171] FIG. 18E shows the amino acid sequence of an improved adenosine base editor described herein, SaKKH-ABEmax. The sequences corresponds to SEQ ID NO: 188.

[0172] FIG. 18F shows the amino acid sequence of an improved circularly permuted cytidine base editor described herein, CP1012-CBEmax. The sequences corresponds to SEQ ID NO: 189.

[0173] FIG. 18G shows the amino acid sequence of an improved circularly permuted cytidine base editor described herein, CP1028-CBEmax. The sequences corresponds to SEQ ID NO: 190.

[0174] FIG. 18H shows the amino acid sequence of an improved circularly permuted cytidine base editor described herein, CP1041-CBEmax. The sequences corresponds to SEQ ID NO: 191.

[0175] FIG. 18I shows the amino acid sequence of an improved circularly permuted cytidine base editor described herein, CP1249-CBEmax. The sequences corresponds to SEQ ID NO: 192.

[0176] FIG. 18J shows the amino acid sequence of an improved circularly permuted cytidine base editor described herein, CP1300-CBEmax. The sequences corresponds to SEQ ID NO: 193.

[0177] FIG. 18K shows the amino acid sequence of an improved circularly permuted adenosine base editor described herein, CP1012-ABEmax. The sequences corresponds to SEQ ID NO: 194.

[0178] FIG. 18L shows the amino acid sequence of an improved circularly permuted adenosine base editor described herein, CP1028-ABEmax. The sequences corresponds to SEQ ID NO: 195.

[0179] FIG. 18M shows the amino acid sequence of an improved circularly permuted adenosine base editor described herein, CP1041-ABEmax. The sequences corresponds to SEQ ID NO: 196.

[0180] FIG. 18N shows the amino acid sequence of an improved circularly permuted adenosine base editor described herein, CP1249-ABEmax. The sequences corresponds to SEQ ID NO: 197.

[0181] FIG. 18O shows the amino acid sequence of an improved circularly permuted adenosine base editor described herein, CP1300-ABEmax. The sequences corresponds to SEQ ID NO: 198.

[0182] FIG. 19 shows the protospacer sequences for 32 mammalian genomic sites referenced in Example 1. Sequences correspond from top to bottom to SEQ ID NOs: 199-230.

[0183] FIG. 20 shows the primer sequences used for mammalian cell genomic target site DNA amplification as referenced in Example 1. Sequences correspond from top to bottom to SEQ ID NOs: 231-294.

[0184] FIG. 21 shows a representative batch file input with parameters for Crispresso2 HTS analysis.

### DEFINITIONS

[0185] As used herein and in the claims, the singular forms “a,” “an,” and “the” include the singular and the plural reference unless the context clearly indicates otherwise. Thus, for example, a reference to “an agent” includes a single agent and a plurality of such agents.

### AAV

[0186] An “adeno-associated virus” or “AAV” is a virus which infects humans and some other primate species. Reference to a “recombinant AAV” or “rAAV” refers to an AAV that has been modified by recombinant engineering (e.g., to carry a modified genome encoding one or more desired genes of interest). In various embodiments, AAVs or rAAVs can be used to administer nucleotide molecules encoding the fusion proteins and guide RNAs disclosed herein to cells in which base editing is desired.

[0187] The wild-type AAV genome is a single-stranded deoxyribonucleic acid (ssDNA), either positive- or negative-sensed. The genome comprises two inverted terminal repeats (ITRs), one at each end of the DNA strand, and two open reading frames (ORFs): rep and cap between the ITRs. The rep ORF comprises four overlapping genes encoding Rep proteins required for the AAV life cycle. The cap ORF comprises overlapping genes encoding capsid proteins: VP1, VP2 and VP3, which interact together to form the viral capsid. VP1, VP2 and VP3 are translated from one mRNA transcript, which can be spliced in two different manners: either a longer or shorter intron can be excised resulting in the formation of two isoforms of mRNAs: a ˜2.3 kb- and a ˜2.6 kb-long mRNA isoform. The capsid forms a supramolecular assembly of approximately 60 individual capsid protein subunits into a non-enveloped, T-1 icosahedral lattice capable of protecting the AAV genome. The mature capsid is composed of VP1, VP2, and VP3 (molecular masses of approximately 87, 73, and 62 kDa respectively) in a ratio of about 1:1:10. Reference to an AAV virion refers to a fully-assembled virus particle having a capsid assembly encasing the AAV genome. An AAV virion may be equivalently referred to as an “AAV particle,” or an “rAAV particle” in the case of a recombinant AAV.

[0188] rAAV particles may comprise a nucleic acid vector (e.g., a recombinant genome), which may comprise at a minimum: (a) one or more heterologous nucleic acid regions comprising a sequence encoding a protein or polypeptide of interest (e.g., a split Cas9 or split nucleobase) or an RNA of interest (e.g., a gRNA), or one or more nucleic acid regions comprising a sequence encoding a Rep protein; and (b) one or more regions comprising inverted terminal repeat (ITR) sequences (e.g., wild-type ITR sequences or engineered ITR sequences) flanking the one or more nucleic acid regions (e.g., heterologous nucleic acid regions). In some embodiments, the nucleic acid vector is between 4 kb and 5 kb in size (e.g., 4.2 to 4.7 kb in size). In some embodiments, the nucleic acid vector further comprises a region encoding a Rep protein. In some embodiments, the nucleic acid vector is circular. In some embodiments, the nucleic acid vector is single-stranded. In some embodiments, the nucleic acid vector is double-stranded. In some embodiments, a double-stranded nucleic acid vector may be, for example, a self-complimentary vector that contains a region of the nucleic acid vector that is complementary to another region of the nucleic acid vector, initiating the formation of the double-strandedness of the nucleic acid vector.

### Adenosine Deaminase

[0189] As used herein, the term “adenosine deaminase” or “adenosine deaminase domain” refers to a protein or enzyme that catalyzes a deamination reaction of an adenosine (the form taken by the nucleobase adenine when combined with ribose). In some cases, one may also equivalently refer to an adenosine deaminase as a “adenine deaminase”. In certain embodiments, the disclosure provides base editor fusion proteins comprising one or more adenosine deaminase domains. For instance, an adenosine deaminase domain may comprise a heterodimer of a first adenosine deaminase and a second deaminase domain, connected by a linker. Adenosine deaminases (e.g., engineered adenosine deaminases or evolved adenosine deaminases) provided herein may be enzymes that convert adenine (A) to inosine (I) in DNA or RNA. Such adenosine deaminase can lead to the conversion of an A:T nucleobase pair to a G:C nucleobase pair. In some embodiments, the deaminase is a variant of a naturally-occurring deaminase from an organism. In some embodiments, the deaminase does not occur in nature, e.g., a deaminase derivative achieved through mutagenesis or directed evolution process. For example, in some embodiments, the deaminase is at least 50%, at least 55%, at least 60%, at least 65%, at least 70%, at least 75% at least 80%, at least 85%, at least 90%, at least 95%, at least 96%, at least 97%, at least 98%, at least 99%, or at least 99.5% identical to a naturally-occurring deaminase.

[0190] In some embodiments, the adenosine deaminase is derived from a bacterium, such as, E. coli, S. aureus, S. typhi, S. putrefaciens, H. influenzae, or C. crescentus. In some embodiments, the adenosine deaminase is a TadA deaminase. In some embodiments, the TadA deaminase is an E. coli TadA deaminase (ecTadA). In some embodiments, the TadA deaminase is a truncated E. coli TadA deaminase. For example, the truncated ecTadA may be missing one or more N-terminal amino acids relative to a full-length ecTadA. In some embodiments, the truncated ecTadA may be missing 1, 2, 3, 4, 5, 6, 7, 8, 9, 10, 11, 12, 13, 14, 15, 6, 17, 18, 19, or 20 N-terminal amino acid residues relative to the full length ecTadA. In some embodiments, the truncated ecTadA may be missing 1, 2, 3, 4, 5, 6, 7, 8, 9, 10, 11, 12, 13, 14, 15, 6, 17, 18, 19, or 20 C-terminal amino acid residues relative to the full length ecTadA. In some embodiments, the ecTadA deaminase does not comprise an N-terminal methionine. Reference is made to U.S. Patent Publication No. 2018/0073012, published Mar. 15, 2018, which is incorporated herein by reference.

### Antisense Strand

[0191] In genetics, the “antisense” strand of a segment within double-stranded DNA is the template strand which codes for the mRNA that becomes translated into a polypeptide. The mRNA runs in the 5′ to 3′ direction; thus, the antisense strand runs in the 3′ to 5′ orientation. By contrast, the “sense” strand is the segment within double-stranded DNA that runs from 5′ to 3′ and matches the sequence of the mRNA. The sense strand is complementary to the antisense strand of DNA. In the case of a DNA segment that encodes a protein, the sense strand is the strand of DNA that has the same sequence as the mRNA, which takes the antisense strand as its template during transcription, and eventually undergoes (typically, not always) translation into a protein. The antisense strand is thus responsible for the RNA that is later translated to protein, while the sense strand possesses a nearly identical makeup to that of the mRNA. Note that for each segment of dsDNA, there will possibly be two sets of sense and antisense, depending on which direction one reads (since sense and antisense is relative to perspective). It is ultimately the gene product, or mRNA, that dictates which strand of one segment of dsDNA is referred to as sense or antisense.

### Base Editing

[0192] As used herein, the term “base editing” refers to genome editing technology that involves the conversion of a specific nucleic acid base into another at a targeted genomic locus. In certain embodiments, this can be achieved without requiring double-stranded DNA breaks (DSB), or single stranded breaks (i.e., nicking). To date, other genome editing techniques, including CRISPR-based systems, begin with the introduction of a DSB at a locus of interest. Subsequently, cellular DNA repair enzymes mend the break, commonly resulting in random insertions or deletions (indels) of bases at the site of the DSB. However, when the introduction or correction of a point mutation at a target locus is desired rather than stochastic disruption of the entire gene, these genome editing techniques are unsuitable, as correction rates are low (e.g. typically 0.1% to 5%), with the major genome editing products being indels. In order to increase the efficiency of gene correction without simultaneously introducing random indels, the present inventors previously modified the CRISPR/Cas9 system to directly convert one DNA base into another without DSB formation. See, Komor, A. C., et al., Programmable editing of a target base in genomic DNA without double-stranded DNA cleavage. Nature 533, 420-424 (2016), the entire contents of which is incorporated by reference herein.

### Base Editor

[0193] The term “base editor (BE)” or “nucleobase editor” as used herein, refers to an agent comprising one or more polypeptides that together are capable of making a modification to a base (e.g., A, T, C, G, or U) within a nucleic acid sequence (e.g., DNA or RNA) that converts one base to another (e.g., A to G, A to C, A to T, C to T, C to G, C to A, G to A, G to C, G to T, T to A, T to C, T to G). In some embodiments, the base editor is capable of deaminating a base within a nucleic acid such as a base within a DNA molecule. In the case of an adenine base editor, the base editor is capable of deaminating an adenine (A) in DNA. Such base editors may include a nucleic acid programmable DNA binding protein (napDNAbp) fused to an adenosine deaminase. Some base editors include CRISPR-mediated fusion proteins that are utilized in the base editing methods described herein. In some embodiments, the base editor comprises a nuclease-inactive Cas9 (dCas9) fused to a deaminase which binds a nucleic acid in a guide RNA-programmed manner via the formation of an R-loop, but does not cleave the nucleic acid. For example, the dCas9 domain of the fusion protein may include a D10A and a H840A mutation (which renders Cas9 capable of cleaving only one strand of a nucleic acid duplex), as described in PCT/US2016/058344, which published as WO 2017/070632 on Apr. 27, 2017 and is incorporated herein by reference in its entirety. The DNA cleavage domain of S. pyogenes Cas9 includes two subdomains, the HNH nuclease subdomain and the RuvC1 subdomain. The HNH subdomain cleaves the strand complementary to the gRNA (the “targeted strand”, or the strand in which editing or deamination occurs), whereas the RuvC1 subdomain cleaves the non-complementary strand containing the PAM sequence (the “non-edited strand”). The RuvC1 mutant D10A generates a nick in the targeted strand, while the HNH mutant H840A generates a nick on the non-edited strand (see Jinek et al., Science, 337:816-821(2012); Qi et al., Cell. 28; 152(5):1173-83 (2013)).

[0194] In some embodiments, a base editor is a macromolecule or macromolecular complex that results primarily (e.g., more than 80%, more than 85%, more than 90%, more than 95%, more than 99%, more than 99.9%, or 100%) in the conversion of a nucleobase in a polynucleic acid sequence into another nucleobase (i.e., a transition or transversion) using a combination of 1) a nucleotide-, nucleoside-, or nucleobase-modifying enzyme and 2) a nucleic acid binding protein that can be programmed to bind to a specific nucleic acid sequence.

[0195] In some embodiments, the base editor comprises a DNA binding domain (e.g., a programmable DNA binding domain such as a dCas9 or nCas9) that directs it to a target sequence. In some embodiments, the nucleobase editor comprises a nucleobase modifying enzyme fused to a programmable DNA binding domain (e.g., a dCas9 or nCas9). A “nucleobase modifying enzyme” is an enzyme that can modify a nucleobase and convert one nucleobase to another, directly or indirectly (e.g., a deaminase such as a cytidine deaminase or an adenosine deaminase). In some embodiments, the nucleobase editor may target cytosine (C) bases in a nucleic acid sequence and convert the C to thymine (T) base. In some embodiments, the C to T editing is carried out by a deaminase, e.g., a cytidine deaminase. Base editors that can carry out other types of base conversions (e.g., adenosine (A) to guanine (G), C to G) are also contemplated.

[0196] Nucleobase editors that convert a C to T, in some embodiments, comprise a cytidine deaminase. A “cytidine deaminase” refers to an enzyme that catalyzes the chemical reaction “cytosine+H₂O→uracil+NH₃” or “5-methyl-cytosine+H₂O→thymine+NH₃.” As it may be apparent from the reaction formula, such chemical reactions result in a C to U/T nucleobase change. In the context of a gene, such a nucleotide change, or mutation, may in turn lead to an amino acid change in the protein, which may affect the protein's function, e.g., loss-of-function or gain-of-function. In some embodiments, the C to T nucleobase editor comprises a dCas9 or nCas9 fused to a cytidine deaminase. In some embodiments, the cytidine deaminase domain is fused to the N-terminus of the dCas9 or nCas9. In some embodiments, the nucleobase editor further comprises a domain that inhibits uracil glycosylase, and/or a nuclear localization signal.

[0197] Such nucleobase editors have been described in the art, e.g., in Rees & Liu, Nat Rev Genet. 2018; 19(12):770-788 and Koblan et al., Nat Biotechnol. 2018; 36(9):843-846; as well as. U.S. Patent Publication No. 2018/0073012, published Mar. 15, 2018, which issued as U.S. Pat. No. 10,113,163; on Oct. 30, 2018; U.S. Patent Publication No. 2017/0121693, published May 4, 2017, which issued as U.S. Pat. No. 10,167,457 on Jan. 1, 2019; International Publication No. WO 2017/070633, published Apr. 27, 2017; U.S. Patent Publication No. 2015/0166980, published Jun. 18, 2015; U.S. Pat. No. 9,840,699, issued Dec. 12, 2017; U.S. Pat. No. 10,077,453, issued Sep. 18, 2018; International Publication No. WO 2019/023680, published Jan. 31, 2019; International Publication No. WO 2018/0176009, published Sep. 27, 2018, International Application No PCT/US2019/033848, filed May 23, 2019, International Application No. PCT/US2019/47996, filed Aug. 23, 2019; International Application No. PCT/US2019/049793, filed Sep. 5, 2019; U.S. Provisional Application No. 62/835,490, filed Apr. 17, 2019; International Application No. PCT/US2019/61685, filed Nov. 15, 2019; International Application No. PCT/US2019/57956, filed Oct. 24, 2019; U.S. Provisional Application No. 62/858,958, filed Jun. 7, 2019; International Publication No. PCT/US2019/58678, filed Oct. 29, 2019, the contents of each of which are incorporated herein by reference in their entireties.

[0198] In some embodiments, a nucleobase editor converts an A to G. In some embodiments, the nucleobase editor comprises an adenosine deaminase. An “adenosine deaminase” is an enzyme involved in purine metabolism. It is needed for the breakdown of adenosine from food and for the turnover of nucleic acids in tissues. Its primary function in humans is the development and maintenance of the immune system. An adenosine deaminase catalyzes hydrolytic deamination of adenosine (forming inosine, which base pairs as G) in the context of DNA. There are no known adenosine deaminases that act on DNA. Instead, known adenosine deaminase enzymes only act on RNA (tRNA or mRNA). Evolved deoxyadenosine deaminase enzymes that accept DNA substrates and deaminate dA to deoxyinosine have been described, e.g., in PCT Application PCT/US2017/045381, filed Aug. 3, 2017, which published as WO 2018/027078, and PCT Application No. PCT/US2019/033848, which published as WO 2019/226953, each of which is herein incorporated by reference by reference.

[0199] Exemplary adenosine base editors (ABEs) and cytosine base editors (CBEs) are also described in Rees & Liu, Base editing: precision chemistry on the genome and transcriptome of living cells, Nat. Rev. Genet. 2018; 19(12):770-788; as well as U.S. Patent Publication No. 2018/0073012, published Mar. 15, 2018, which issued as U.S. Pat. No. 10,113,163, on Oct. 30, 2018; U.S. Patent Publication No. 2017/0121693, published May 4, 2017, which issued as U.S. Pat. No. 10,167,457 on Jan. 1, 2019; International Publication No. WO 2017/070633, published Apr. 27, 2017; U.S. Patent Publication No. 2015/0166980, published Jun. 18, 2015; U.S. Pat. No. 9,840,699, issued Dec. 12, 2017; and U.S. Pat. No. 10,077,453, issued Sep. 18, 2018, the contents of each of which are incorporated herein by reference in their entireties.

### Cas9

[0200] The term “Cas9” or “Cas9 nuclease” refers to an RNA-guided nuclease comprising a Cas9 domain, or a fragment thereof (e.g., a protein comprising an active or inactive DNA cleavage domain of Cas9, and/or the gRNA binding domain of Cas9). A “Cas9 domain” as used herein, is a protein fragment comprising an active or inactive cleavage domain of Cas9 and/or the gRNA binding domain of Cas9. A “Cas9 protein” is a full length Cas9 protein. A Cas9 nuclease is also referred to sometimes as a casn1 nuclease or a CRISPR (Clustered Regularly Interspaced Short Palindromic Repeat)-associated nuclease. CRISPR is an adaptive immune system that provides protection against mobile genetic elements (viruses, transposable elements, and conjugative plasmids). CRISPR clusters contain spacers, sequences complementary to antecedent mobile elements, and target invading nucleic acids. CRISPR clusters are transcribed and processed into CRISPR RNA (crRNA). In type II CRISPR systems correct processing of pre-crRNA requires a trans-encoded small RNA (tracrRNA), endogenous ribonuclease 3 (rnc) and a Cas9 domain. The tracrRNA serves as a guide for ribonuclease 3-aided processing of pre-crRNA. Subsequently, Cas9/crRNA/tracrRNA endonucleolytically cleaves linear or circular dsDNA target complementary to the spacer. The target strand not complementary to crRNA is first cut endonucleolytically, then trimmed 3′-5′ exonucleolytically. In nature, DNA-binding and cleavage typically requires protein and both RNAs. However, single guide RNAs (“sgRNA”, or simply “gNRA”) can be engineered so as to incorporate aspects of both the crRNA and tracrRNA into a single RNA species. See, e.g., Jinek M., Chylinski K., Fonfara I., Hauer M., Doudna J. A., Charpentier E. Science 337:816-821(2012), the entire contents of which are hereby incorporated by reference.

[0201] Cas9 recognizes a short motif in the CRISPR repeat sequences (the PAM or protospacer adjacent motif) to help distinguish self versus non-self. Cas9 nuclease sequences and structures are well known to those of skill in the art (see, e.g., “Complete genome sequence of an M1 strain of Streptococcus pyogenes.” Ferretti et al., J. J., McShan W. M., Ajdic D. J., Savic D. J., Savic G., Lyon K., Primeaux C., Sezate S., Suvorov A. N., Kenton S., Lai H. S., Lin S. P., Qian Y., Jia H. G., Najar F. Z., Ren Q., Zhu H., Song L., White J., Yuan X., Clifton S. W., Roe B. A., McLaughlin R. E., Proc. Natl. Acad. Sci. U.S.A. 98:4658-4663(2001); “CRISPR RNA maturation by trans-encoded small RNA and host factor RNase III.” Deltcheva E., Chylinski K., Sharma C. M., Gonzales K., Chao Y., Pirzada Z. A., Eckert M. R., Vogel J., Charpentier E., Nature 471:602-607(2011); and “A programmable dual-RNA-guided DNA endonuclease in adaptive bacterial immunity.” Jinek M., Chylinski K., Fonfara I., Hauer M., Doudna J. A., Charpentier E. Science 337:816-821(2012), the entire contents of each of which are incorporated herein by reference). Cas9 orthologs have been described in various species, including, but not limited to, S. pyogenes and S. thermophilus. Additional suitable Cas9 nucleases and sequences will be apparent to those of skill in the art based on this disclosure, and such Cas9 nucleases and sequences include Cas9 sequences from the organisms and loci disclosed in Chylinski, Rhun, and Charpentier, “The tracrRNA and Cas9 families of type II CRISPR-Cas immunity systems” (2013) RNA Biology 10:5, 726-737; the entire contents of which are incorporated herein by reference. In some embodiments, a Cas9 nuclease comprises one or more mutations that partially impair or inactivate the DNA cleavage domain.

[0202] A nuclease-inactivated Cas9 domain may interchangeably be referred to as a “dCas9” protein (for nuclease-dead Cas9). Methods for generating a Cas9 domain (or a fragment thereof) having an inactive DNA cleavage domain are known (see, e.g., Jinek et al., Science. 337:816-821(2012); Qi et al., “Repurposing CRISPR as an RNA-Guided Platform for Sequence-Specific Control of Gene Expression” (2013) Cell. 28; 152(5):1173-83, the entire contents of each of which are incorporated herein by reference). For example, the DNA cleavage domain of Cas9 is known to include two subdomains, the HNH nuclease subdomain and the RuvC1 subdomain.

[0203] The HNH subdomain cleaves the strand complementary to the gRNA, whereas the RuvC1 subdomain cleaves the non-complementary strand. Mutations within these subdomains can silence the nuclease activity of Cas9. For example, the mutations D10A and H840A completely inactivate the nuclease activity of S. pyogenes Cas9 (Jinek et al., Science. 337:816-821(2012); Qi et al., Cell. 28; 152(5):1173-83 (2013)). In some embodiments, proteins comprising fragments of Cas9 are provided.

[0204] For example, in some embodiments, a protein comprises one of two Cas9 domains: (1) the gRNA binding domain of Cas9; or (2) the DNA cleavage domain of Cas9. In some embodiments, proteins comprising Cas9 or fragments thereof are referred to as “Cas9 variants.” A Cas9 variant shares homology to Cas9, or a fragment thereof. For example, a Cas9 variant is at least about 70% identical, at least about 80% identical, at least about 90% identical, at least about 95% identical, at least about 96% identical, at least about 97% identical, at least about 98% identical, at least about 99% identical, at least about 99.5% identical, at least about 99.8% identical, or at least about 99.9% identical to a wild type Cas9 (e.g., the canonical SpCas9). In some embodiments, the Cas9 variant may have 1, 2, 3, 4, 5, 6, 7, 8, 9, 10, 11, 12, 13, 14, 15, 16, 17, 18, 19, 20, 21, 22, 21, 24, 25, 26, 27, 28, 29, 30, 31, 32, 33, 34, 35, 36, 37, 38, 39, 40, 41, 42, 43, 44, 45, 46, 47, 48, 49, 50, or more amino acid changes compared to SpCas9.

[0205] In some embodiments, the Cas9 variant comprises a fragment of Cas9 (e.g., a gRNA binding domain or a DNA-cleavage domain), such that the fragment is at least about 70% identical, at least about 80% identical, at least about 90% identical, at least about 95% identical, at least about 96% identical, at least about 97% identical, at least about 98% identical, at least about 99% identical, at least about 99.5% identical, or at least about 99.9% identical to the corresponding fragment of a wild type Cas9 (e.g., canonical SpCas9). In some embodiments, the fragment is at least 30%, at least 35%, at least 40%, at least 45%, at least 50%, at least 55%, at least 60%, at least 65%, at least 70%, at least 75%, at least 80%, at least 85%, at least 90%, at least 95% identical, at least 96%, at least 97%, at least 98%, at least 99%, or at least 99.5% of the amino acid length of a corresponding wild type Cas9 (e.g., canonical SpCas9).

[0206] As used herein, the term “nCas9” or “Cas9 nickase” refers to a Cas9 or a variant thereof, which cleaves or nicks only one of the strands of a target cut site thereby introducing a nick in a double strand DNA molecule rather than creating a double strand break. This can be achieved by introducing appropriate mutations in a wild-type Cas9 which inactivates one of the two endonuclease activities of the Cas9. Any suitable mutation which inactivates one Cas9 endonuclease activity but leaves the other intact is contemplated, such as one of D10A or H840A mutations in the wild-type S. pyogenes Cas9 amino acid sequence, or a D10A mutation in the wild-type S. aureus Cas9 amino acid sequence, may be used to form the nCas9.

### Cytidine Deaminase

[0207] As used herein, a “cytidine deaminase” encoded by the CDA gene is an enzyme that catalyzes the removal of an amine group from cytidine (i.e., the base cytosine when attached to a ribose ring) to uridine (C to U) and deoxycytidine to deoxyuridine (C to U). A non-limiting example of a cytidine deaminase is APOBEC1 (“apolipoprotein B mRNA editing enzyme, catalytic polypeptide 1”). Another example is AID (“activation-induced cytidine deaminase”). Under standard Watson-Crick hydrogen bond pairing, a cytosine base hydrogen bonds to a guanine base. When cytidine is converted to uridine (or deoxycytidine is converted to deoxyuridine), the uridine (or the uracil base of uridine) undergoes hydrogen bond pairing with the base adenine. Thus, a conversion of “C” to uridine (“U”) by cytidine deaminase will cause the insertion of “A” instead of a “G” during cellular repair and/or replication processes. Since the adenine “A” pairs with thymine “T”, the cytidine deaminase in coordination with DNA replication causes the conversion of an C⋅G pairing to a T⋅A pairing in the double-stranded DNA molecule.

### CRISPR/Cas

[0208] CRISPR is a family of DNA sequences (i.e., CRISPR clusters) in bacteria and archaea that represent snippets of prior infections by a virus that have invaded the prokaryote. The snippets of DNA are used by the prokaryotic cell to detect and destroy DNA from subsequent attacks by similar viruses and effectively compose, along with an array of CRISPR-associated proteins (including Cas9 and homologs thereof) and CRISPR-associated RNA, a prokaryotic immune defense system. In nature, CRISPR clusters are transcribed and processed into CRISPR RNA (crRNA). In certain types of CRISPR systems (e.g., type II CRISPR systems), correct processing of pre-crRNA requires a trans-encoded small RNA (tracrRNA), endogenous ribonuclease 3 (rnc) and a Cas9 protein. The tracrRNA serves as a guide for ribonuclease 3-aided processing of pre-crRNA. Subsequently, Cas9/crRNA/tracrRNA endonucleolytically cleaves linear or circular dsDNA target complementary to the RNA. Specifically, the target strand not complementary to crRNA is first cut endonucleolytically, then trimmed 3′-5′ exonucleolytically. In nature, DNA-binding and cleavage typically requires protein and both RNAs. However, single guide RNAs (“sgRNA”, or simply “gNRA”) can be engineered so as to incorporate aspects of both the crRNA and tracrRNA into a single RNA species—the guide RNA. See, e.g., Jinek M., Chylinski K., Fonfara I., Hauer M., Doudna J. A., Charpentier E. Science 337:816-821(2012), the entire contents of which is hereby incorporated by reference. Cas9 recognizes a short motif in the CRISPR repeat sequences (the PAM or protospacer adjacent motif) to help distinguish self versus non-self. CRISPR biology, as well as Cas9 nuclease sequences and structures are well known to those of skill in the art (see, e.g., “Complete genome sequence of an M1 strain of Streptococcus pyogenes.” Ferretti et al., J. J., McShan W. M., Ajdic D. J., Savic D. J., Savic G., Lyon K., Primeaux C., Sezate S., Suvorov A. N., Kenton S., Lai H. S., Lin S. P., Qian Y., Jia H. G., Najar F. Z., Ren Q., Zhu H., Song L., White J., Yuan X., Clifton S. W., Roe B. A., McLaughlin R. E., Proc. Natl. Acad. Sci. U.S.A. 98:4658-4663(2001); “CRISPR RNA maturation by trans-encoded small RNA and host factor RNase III.” Deltcheva E., Chylinski K., Sharma C. M., Gonzales K., Chao Y., Pirzada Z. A., Eckert M. R., Vogel J., Charpentier E., Nature 471:602-607(2011); and “A programmable dual-RNA-guided DNA endonuclease in adaptive bacterial immunity.” Jinek M., Chylinski K., Fonfara I., Hauer M., Doudna J. A., Charpentier E. Science 337:816-821(2012), the entire contents of each of which are incorporated herein by reference). Cas9 orthologs have been described in various species, including, but not limited to, S. pyogenes and S. thermophilus. Additional suitable Cas9 nucleases and sequences will be apparent to those of skill in the art based on this disclosure, and such Cas9 nucleases and sequences include Cas9 sequences from the organisms and loci disclosed in Chylinski, Rhun, and Charpentier, “The tracrRNA and Cas9 families of type II CRISPR-Cas immunity systems” (2013) RNA Biology 10:5, 726-737; the entire contents of which are incorporated herein by reference.

[0209] It will be appreciated that for some applications, CRISPR/Cas9 can be used to knock out a gene. In other applications, such as the subject matter disclosed herein, CRISPR/Cas9 may be used to edit a gene through the combined action of a modified Cas9 and one or more effector proteins which cause a desired change in the sequence of the gene (e.g., correction of a point mutation). In either case, the genomic target can be any ˜20 nucleotide DNA sequence, provided it meets two conditions: (1) the sequence is unique compared to the rest of the genome, (2) the target is present immediately adjacent to a Protospacer Adjacent Motif (PAM).

[0210] The PAM sequence serves as a binding signal for Cas9, but the exact sequence depends on which Cas protein is used. Once expressed, the Cas9 protein and the gRNA form a ribonucleoprotein complex through interactions between the gRNA scaffold and surface-exposed positively-charged grooves on Cas9. Cas9 undergoes a conformational change upon gRNA binding that shifts the molecule from an inactive, non-DNA binding conformation into an active DNA-binding conformation. Importantly, the protospacer region of the gRNA remains free to interact with target DNA.

[0211] Cas9 will only cleave a given locus if the gRNA spacer sequence shares sufficient homology with the target DNA. Once the Cas9-gRNA complex binds a putative DNA target, the seed sequence (8-10 bases at the 3′ end of the gRNA targeting sequence) will begin to anneal to the target DNA. If the seed and target DNA sequences match, the gRNA will continue to anneal to the target DNA in a 3′ to 5′ direction. Thus, mismatches between the target sequence in the 3′ seed sequence tend to abolish target cleavage, whereas mismatches toward the 5′ end distal to the PAM often tend to permit target cleavage. Cas9 undergoes a second conformational change upon target binding that positions the nuclease domains, called RuvC and HNH, to cleave opposite strands of the target DNA. The end result of Cas9-mediated DNA cleavage is a double-strand break (DSB) within the target DNA (˜3-4 nucleotides upstream of the PAM sequence).

[0212] The resulting DSB is then repaired by one of two general repair pathways: (1) the efficient but error-prone non-homologous end joining (NHEJ) pathway, or (2) the less efficient but high-fidelity homology directed repair (HDR) pathway.

[0213] The NHEJ repair pathway is the most active repair mechanism, and it frequently causes small nucleotide insertions or deletions (indels) at the DSB site. The randomness of NHEJ-mediated DSB repair has important practical implications, because a population of cells expressing Cas9 and a gRNA will result in a diverse array of mutations. In most cases, NHEJ gives rise to small indels in the target DNA that result in amino acid deletions, insertions, or frameshift mutations leading to premature stop codons within the open reading frame (ORF) of the targeted gene. The ideal end result is a loss-of-function mutation within the targeted gene. However, the strength of the knockout phenotype for a given mutant cell must be validated experimentally.

[0214] CRISPR specificity is partially determined by how specific the gRNA targeting sequence is for the genomic target compared to the rest of the genome. Ideally, a gRNA targeting sequence will have perfect homology to the target DNA with no homology elsewhere in the genome. Realistically however, a given gRNA targeting sequence will have additional sites throughout the genome where partial homology exists. These sites are called off-targets and need to be considered when designing a gRNA for your experiment.

[0215] In addition to optimizing gRNA design, CRISPR specificity can also be increased through modifications to Cas9. As discussed previously, Cas9 generates double-strand breaks (DSBs) through the combined activity of two nuclease domains, RuvC and HNH. Cas9 nickase, a D10A mutant of SpCas9, retains one nuclease domain and generates a DNA nick rather than a DSB.

[0216] Thus, two nickases targeting opposite DNA strands are required to generate a DSB within the target DNA. This requirement for a double nick or dual nickase CRISPR system dramatically increases target specificity, since it's unlikely that two off-target nicks will be generated close enough to cause a DSB. If high specificity is crucial, the dual nickase approach may be used to create a double nick-induced DSB.

[0217] While NHEJ-mediated DSB repair often disrupts the open reading frame of the gene, homology directed repair (HDR) can generate specific nucleotide changes ranging from a single nucleotide change to large insertions like the addition of a fluorophore or tag. In order to utilize HDR for gene editing, a DNA repair template containing the desired sequence must be delivered into the cell type of interest with the gRNA(s) and Cas9 or Cas9 nickase. The repair template must contain the desired edit as well as additional homologous sequence immediately upstream and downstream of the target (termed left & right homology arms.) The length of each homology arm is dependent on the size of the change being introduced, with larger insertions requiring longer homology arms.

[0218] The efficiency of HDR is generally low (<10% of modified alleles). For this reason, many laboratories try to enhance HDR by synchronizing the cells, since HDR takes place during the S and G2 phases of the cell cycle. Chemically or genetically inhibiting genes involved in NHEJ may also increase HDR frequency. Additionally, Cas9-CtIP, a fusion of Cas9 and CtIP, a protein involved in double-stranded break resection, can contribute to increased HDR efficiency.

[0219] Since the efficiency of Cas9 cleavage is relatively high and the efficiency of HDR is relatively low, a large portion of the Cas9-induced DSBs will be repaired via NHEJ. In other words, the resulting population of cells will contain some combination of wild type alleles, NHEJ-repaired alleles, and/or the desired HDR-edited allele. Therefore, it is important to confirm the presence of the desired edit experimentally and to isolate clones containing the desired edit.

[0220] To overcome low HDR efficiency, David Liu and co-workers have developed base editors that include cytosine base editors (CBEs) and adenine base editors (ABEs)—which modify nucleotide sequences through chemical alterations to the nucleobases themselves. See H. A. Rees and D. R. Liu, “Base editing: precision chemistry on the genome and transcriptome of living cells,” Nat Rev Genet., December 2018, 19(12): 770-788, the contents of which are incorporated herein by reference in their entirety.

[0221] Cytosine base editors are created by fusing Cas9 nickase or catalytically inactive “dead” Cas9 (dCas9) to a cytidine deaminase, such as APOBEC, and convert C⋅G base pairs into T⋅A base pairs (see Komor A C et al., “Programmable editing of a target base in genomic DNA without double-stranded DNA cleavage,” Nature 533, 420-424 (2016), the contents of which are incorporated herein by reference). Base editors are targeted to a specific locus by a gRNA, and they can convert cytidine to uridine within a small editing window near the PAM site. Uridine is subsequently converted to thymidine through base excision repair, creating a C to T change (or a G to A on the opposite strand).

[0222] Likewise, adenosine base editors have been engineered to convert adenosine to inosine, which is treated like guanosine by the cell, creating an A to G (or T to C) change. Thus, adenosine base editors convert A⋅T base pairs to G⋅C base pairs. Adenosine DNA deaminases do not exist in nature. To overcome this problem, Liu and co-workers evolved a deoxyadenosine deaminase enzyme that accepts ssDNA starting from an Escherichia coli tRNA adenosine deaminase enzyme, TadA (see Gaudelli N M et al., “Programmable base editing of A*T to G*C in genomic DNA without DNA cleavage,” Nature, 551, 464-471 (2017), the contents of which are incorporated herein by reference). E. coli cells were equipped with TadA mutants and defective antibiotic resistance genes. To grow in the presence of antibiotic, a mutant TadA-dCas9 fusion (TadA*-dCas9) must convert a deoxyadenosine to a deoxyinosine in the defective antibiotic resistance gene. Bacteria encoding TadA-dCas9 fusions capable of repairing the mutated resistance gene were isolated and then tested in a mammalian cell context.

[0223] Collectively, CBEs and ABEs can mediate all four possible transition mutations (C to T, A to G, T to C, and G to A). Both types of base editors are available with multiple Cas9 variants including high fidelity Cas9's. Further advancements have been made by optimizing expression of the fusions, modifying the linker region between Cas variant and deaminase to adjust the editing window, or adding fusions that increase product purity such as the DNA glycosylase inhibitor (UGI) or the bacteriophage Mu-derived Gam protein (Mu-GAM).

[0224] While many base editors are designed to work in a very narrow window proximal to the PAM sequence, some base editing systems create a wide spectrum of single-nucleotide variants (somatic hypermutation) in a wider editing window, and are thus well suited to directed evolution applications. Examples of these base editing systems include targeted AID-mediated mutagenesis (TAM) and CRISPR-X, in which Cas9 is fused to activation-induced cytidine deaminase (AID).

[0225] CRISPR is a flexible tool for genome manipulation, since Cas enzymes bind target DNA independently of their ability to cleave target DNA. Specifically, both RuvC and HNH nuclease domains can be rendered inactive by point mutations (D10A and H840A in SpCas9), resulting in a nuclease dead Cas9 (dCas9) molecule that cannot cleave target DNA. The dCas9 molecule retains the ability to bind to target DNA based on the gRNA targeting sequence.

[0226] dCas9 can also be fused with transcriptional repressors or activators, and targeting these dCas9 fusion proteins to the promoter region results in robust transcriptional repression (CRISPR interference, or CRISPRi) or activation (CRISPRa) of downstream target genes. The simplest dCas9-based activators and repressors consist of dCas9 fused directly to a single transcriptional activator (e.g., VP64) or repressor (e.g., KRAB).

[0227] Inactive Cas enzymes can also be fused to epigenetic modifiers like p300, LSD1, MQ1, and TET1 to create programmable epigenome-engineering tools. These tools alter gene expression without inducing double-strand breaks by modifying the methylation state of cytosines in a gene's promoter or by inducing histone acetylation or demethylation. CRISPR epigenetic tools are specific for particular chromatin and DNA modifications, allowing researchers to isolate the effects of a single epigenetic mark.

[0228] In addition, numerous Cas9 alternatives or equivalents have been developed and/or used in CRISPR applications. While S. pyogenes Cas9 (SpCas9) is certainly the most commonly used CRISPR endonuclease for genome engineering, alternatives have been developed for various applications. For example, the PAM sequence for SpCas9 (5′-NGG-3′) is abundant throughout the human genome, but an NGG sequence may not be positioned correctly to target a desired gene for modification. This limitation is of particular concern when trying to edit a gene using homology directed repair (HDR), which requires PAM sequences in very close proximity to the region to be edited.

[0229] To address these limitations, researchers including Liu and co-workers have engineered SpCas9 enzymes with altered PAM specificities using a variety of approaches including phage-assisted evolution and directed mutagenesis. This resulted in the development of several SpCas9-derived variants with non-NGG PAM sequences. A Cas9 alternative is xCas9, developed by Liu and co-workers, which targets a broad set of PAM sequences, such as NG, GAA, and GAT, while also displaying minimal off-target activity (see Hu J H et al., “Evolved Cas9 variants with broad PAM compatibility and high DNA specificity, Nature, Apr. 5, 2018, 556(7699): 57-63, which is incorporated herein by reference). SpCas9-NG, a variant that recognizes the NG PAM instead of NGG PAM, has increased activity in vitro relative to other Cas9 endonucleases (see Nishimasu et al., “Engineered CRISPR-Cas9 nuclease with expanded targeting space,” Science, Sep. 21, 2018, 361(6408), pp: 1259-1262, the contents of which are incorporated by reference).

[0230] In addition, Cas9 orthologs from other species bind a variety of PAM sequences. These enzymes may have other characteristics that make them more useful than SpCas9 for specific applications. For example, the relatively large size of SpCas9 (˜4 kb coding sequence) means that plasmids carrying the SpCas9 cDNA cannot be efficiently packaged into adeno-associated virus (AAV). Since the coding sequence for Staphylococcus aureus Cas9 (SaCas9) is ˜1 kb shorter than SpCas9, SaCas9 can be efficiently packaged into AAV. Similar to SpCas9, the SaCas9 endonuclease is capable of modifying target genes in mammalian cells in vitro and in mice in vivo.

### Deaminase or Deaminase Domain

[0231] As used herein, the term “deaminase” or “deaminase domain” or “deaminase moiety” refers to a protein or enzyme that catalyzes a deamination reaction. In some embodiments, the deaminase is an adenosine deaminase, which catalyzes the hydrolytic deamination of adenine or adenosine (e.g., an engineered adenosine deaminase that deaminates adenosine in DNA). In some embodiments, the deaminase or deaminase domain is a cytidine deaminase, catalyzing the hydrolytic deamination of cytidine or deoxycytidine to uridine or deoxyuridine, respectively. In some embodiments, the deaminase or deaminase domain is a cytidine deaminase domain, catalyzing the hydrolytic deamination of cytosine to uracil. In some embodiments, the deaminase or deaminase domain is a naturally-occuring deaminase from an organism, such as a human, chimpanzee, gorilla, monkey, cow, dog, rat, or mouse. In some embodiments, the deaminase or deaminase domain is a variant of a naturally-occurring deaminase from an organism that does not occur in nature. For example, in some embodiments, the deaminase or deaminase domain is at least 50%, at least 55%, at least 60%, at least 65%, at least 70%, at least 75% at least 80%, at least 85%, at least 90%, at least 95%, at least 96%, at least 97%, at least 98%, at least 99%, or at least 99.5% identical to a naturally-occurring deaminase from an organism. The term deaminase also embraces any genetically engineered deaminase that may comprise genetic modifications (e.g., one or more mutations) that results in a variant deaminase having an amino acid sequence comprising one or more changes relative to a wildtype counterpart deaminase. Examples of deaminases are given herein, and the term is not meant to be limiting.

### Editing Window

[0232] As used herein, the “editing window” refers to the portion of the target sequence preceding the PAM sequence that is capable of being edited by a base editor. For the Cas9 from S. pyogenes, the editing window is typically ˜8 to ˜13 bp preceding the PAM sequence. The editing window can be specific to the particular Cas variant or ortholog being used.

### Effective Amount

[0233] The term “effective amount,” as used herein, refers to an amount of a biologically active agent that is sufficient to elicit a desired biological response. For example, in some embodiments, an effective amount of a base editor comprising a CP-Cas9 may refer to the amount of the editor that is sufficient to edit a target site nucleotide sequence, e.g., a genome. In some embodiments, an effective amount of a BE provided herein may refer to the amount of the fusion protein that is sufficient to induce editing of a target site specifically bound and edited by the fusion protein. As will be appreciated by the skilled artisan, the effective amount of an agent, e.g., a fusion protein, a nuclease, a hybrid protein, a protein dimer, a complex of a protein (or protein dimer) and a polynucleotide, or a polynucleotide, may vary depending on various factors as, for example, on the desired biological response, e.g., on the specific allele, genome, or target site to be edited, on the cell or tissue being targeted, and on the agent being used.

### Effector Domain

[0234] The term, as used herein, “effector domain” embraces any protein, enzyme, or polypeptide (or functional fragment thereof) which is capable of modifying a DNA or RNA molecule. Nucleobase modification moieties can be naturally occurring, or can be recombinant. For example, a nucleobase modification moiety can include one or more DNA repair enzymes, for example, and an enzyme or protein involved in base excision repair (BER), nucleotide excision repair (NER), homology-dependent recombinational repair (HR), non-homologous end-joining repair (NHEJ), microhomology end-joining repair (MMEJ), mismatch repair (MMR), direct reversal repair, or other known DNA repair pathway. A nucleobase modification moiety can have one or more types of enzymatic activities, including, but not limited to endonuclease activity, polymerase activity, ligase activity, replication activity, proofreading activity. Nucleobase modification moieties can also include DNA or RNA-modifying enzymes and/or mutagenic enzymes, such as, DNA methylases and deaminating enzymes (i.e., deaminases, including cytidine deaminases and adenosine deaminases, all defined above), which deaminate nucleobases leading in some cases to mutagenic corrections by way of normal cellular DNA repair and replication processes. The “nucleic acid effector domain” (e.g., a DNA effector domain or an RNA effector domain) as used herein may also refer to a protein or enzyme capable of making one or more modifications (e.g., deamination of a cytidine residue) to a nucleic acid (e.g., DNA or RNA). Exemplary nucleic acid editing domains include, but are not limited to a deaminase, a nuclease, a nickase, a recombinase, a methyltransferase, a methylase, an acetylase, an acetyltransferase, a transcriptional activator, or a transcriptional repressor domain. In some embodiments the nucleic acid editing domain is a deaminase (e.g., a cytidine deaminase, such as an APOBEC or an AID deaminase).

### Functional Equivalent

[0235] The term “functional equivalent” refers to a second biomolecule that is equivalent in function, but not necessarily equivalent in structure to a first biomolecule. For example, a “Cas9 equivalent” refers to a protein that has the same or substantially the same functions as Cas9, but not necessarily the same amino acid sequence. In the context of the disclosure, the specification refers throughout to “a protein X, or a functional equivalent thereof.” In this context, a “functional equivalent” of protein X embraces any homolog, paralog, fragment, naturally occurring, engineered, circular permutant, mutated, or synthetic version of protein X which bears an equivalent function.

### Fusion Protein

[0236] The term “fusion protein” as used herein refers to a hybrid polypeptide which comprises protein domains from at least two different proteins. One protein may be located at the amino-terminal (N-terminal) portion of the fusion protein or at the carboxy-terminal (C-terminal) protein thus forming an “amino-terminal fusion protein” or a “carboxy-terminal fusion protein,” respectively. A protein may comprise different domains, for example, a nucleic acid binding domain (e.g., the gRNA binding domain of Cas9 that directs the binding of the protein to a target site) and a nucleic acid cleavage domain or a catalytic domain of a nucleic-acid editing protein. Another example includes a Cas9 or equivalent thereof to a reverse transcriptase. Any of the proteins provided herein may be produced by any method known in the art. For example, the proteins provided herein may be produced via recombinant protein expression and purification, which is especially suited for fusion proteins comprising a peptide linker. Methods for recombinant protein expression and purification are well known, and include those described by Green and Sambrook, Molecular Cloning: A Laboratory Manual (4^{th} ed., Cold Spring Harbor Laboratory Press, Cold Spring Harbor, N.Y. (2012)), the entire contents of which are incorporated herein by reference.

Guide RNA (gRNA)

[0237] As used herein, a “guide RNA” can refer to a synthetic fusion of the endogenous bacterial crRNA and tracrRNA that provides both targeting specificity and scaffolding and/or binding ability for Cas9 nuclease to a target DNA. This synthetic fusion does not exist in nature and is also commonly referred to as an sgRNA. However, the term, guide RNA, also embraces equivalent guide nucleic acid molecules that associate with Cas9 equivalents, homologs, orthologs, or paralogs, whether naturally occurring or non-naturally occurring (e.g., engineered or recombinant), and which otherwise program the Cas9 equivalent to localize to a specific target nucleotide sequence. The Cas9 equivalents may include other napDNAbp from any type of CRISPR system (e.g., type II, V, VI), including Cpf1 (a type-V CRISPR-Cas systems), C2c1 (a type V CRISPR-Cas system), C2c2 (a type VI CRISPR-Cas system) and C2c3 (a type V CRISPR-Cas system). Further Cas-equivalents are described in Makarova et al., “C2c2 is a single-component programmable RNA-guided RNA-targeting CRISPR effector,” Science 2016; 353(6299), the contents of which are incorporated herein by reference. Exemplary sequences are and structures of guide RNAs are provided herein. In addition, methods for designing appropriate guide RNA sequences are provided herein.

[0238] In function, the guide RNAs associate with Cas9, directing the Cas9 protein to a specific sequence in a DNA molecule that includes complementarity to protospace sequence of the guide RNA.

[0239] Spacer sequence—the sequence in the guide RNA (having ˜20 nts in length) which has the same sequence as the protospacer in the target DNA, and which is complementary to the target strand of the target DNA.

[0240] gRNA core (or gRNA scaffold or gRNA backbone sequence)—refers to the sequence within the gRNA that is responsible for Cas9 binding, it does not include the ˜20 bp spacer sequence that is used to guide Cas9 to target DNA.

### Guide RNA Target Sequence

[0241] As used herein, the “guide RNA target sequence” refers to the ˜20 nucleotides that are complementary to the protospacer sequence in the PAM strand. The target sequence is the sequence that anneals to or is targeted by the spacer sequence of the guide RNA. The spacer sequence of the guide RNA and the protospacer have the same sequence (except the spacer sequence is RNA and the protospacer is DNA).

### Guide RNA Scaffold Sequence

[0242] As used herein, the “guide RNA scaffold sequence” refers to the sequence within the gRNA that is responsible for Cas9 binding, it does not include the 20 bp spacer sequence that is used to guide Cas9 to target DNA.

### Host Cell

[0243] The term “host cell,” as used herein, refers to a cell that can host, replicate, and express a vector described herein, e.g., a vector comprising a nucleic acid molecule encoding a fusion protein comprising a CP-Cas9 and a deaminase (e.g., a cytidine deaminase or adenosine deaminase). In some embodiments, the host cell is a prokaryotic cell, for example, a bacterial cell. In some embodiments, the host cell is an E. coli cell. In some embodiments, the host cell is a eukaryotic cell, for example, a yeast cell, an insect cell, or a mammalian cell. The type of host cell, will, of course, depend on the viral vector employed, and suitable host cell/viral vector combinations will be readily apparent to those of skill in the art.

### Inteins

[0244] As used herein, the term “intein” refers to auto-processing polypeptide domains found in organisms from all domains of life. An intein (intervening protein) carries out a unique auto-processing event known as protein splicing in which it excises itself out from a larger precursor polypeptide through the cleavage of two peptide bonds and, in the process, ligates the flanking extein (external protein) sequences through the formation of a new peptide bond. This rearrangement occurs post-translationally (or possibly co-translationally), as intein genes are found embedded in frame within other protein-coding genes. Furthermore, intein-mediated protein splicing is spontaneous; it requires no external factor or energy source, only the folding of the intein domain. This process is also known as cis-protein splicing, as opposed to the natural process of trans-protein splicing with “split inteins.”

[0245] Split inteins are a sub-category of inteins. Unlike the more common contiguous inteins, split inteins are transcribed and translated as two separate polypeptides, the N-intein and C-intein, each fused to one extein. Upon translation, the intein fragments spontaneously and non-covalently assemble into the canonical intein structure to carry out protein splicing in trans.

[0246] Inteins and split inteins are the protein equivalent of the self-splicing RNA introns (see Perler et al., Nucleic Acids Res. 22:1125-1127 (1994)), which catalyze their own excision from a precursor protein with the concomitant fusion of the flanking protein sequences, known as exteins (reviewed in Perler et al., Curr. Opin. Chem. Biol. 1:292-299 (1997); Perler, F. B. Cell 92(1):1-4 (1998); Xu et al., EMBO J. 15(19):5146-5153 (1996)).

[0247] As used herein, the term “protein splicing” refers to a process in which an interior region of a precursor protein (an intein) is excised and the flanking regions of the protein (exteins) are ligated to form the mature protein. This natural process has been observed in numerous proteins from both prokaryotes and eukaryotes (Perler, F. B., Xu, M. Q., Paulus, H. Current Opinion in Chemical Biology 1997, 1, 292-299; Perler, F. B. Nucleic Acids Research 1999, 27, 346-347). The intein unit contains the necessary components needed to catalyze protein splicing and often contains an endonuclease domain that participates in intein mobility (Perler, F. B., Davis, E. O., Dean, G. E., Gimble, F. S., Jack, W. E., Neff, N., Noren, C. J., Thomer, J., Belfort, M. Nucleic Acids Research 1994, 22, 1127-1127). The resulting proteins are linked, however, not expressed as separate proteins. Protein splicing may also be conducted in trans with split inteins expressed on separate polypeptides spontaneously combine to form a single intein which then undergoes the protein splicing process to join to separate proteins.

[0248] The elucidation of the mechanism of protein splicing has led to a number of intein-based applications (Comb, et al., U.S. Pat. No. 5,496,714; Comb, et al., U.S. Pat. No. 5,834,247; Camarero and Muir, J. Amer. Chem. Soc., 121:5597-5598 (1999); Chong, et al., Gene, 192:271-281 (1997), Chong, et al., Nucleic Acids Res., 26:5109-5115 (1998); Chong, et al., J. Biol. Chem., 273:10567-10577 (1998); Cotton, et al. J. Am. Chem. Soc., 121:1100-1101 (1999); Evans, et al., J. Biol. Chem., 274:18359-18363 (1999); Evans, et al., J. Biol. Chem., 274:3923-3926 (1999); Evans, et al., Protein Sci., 7:2256-2264 (1998); Evans, et al., J. Biol. Chem., 275:9091-9094 (2000); Iwai and Pluckthun, FEBS Lett. 459:166-172 (1999); Mathys, et al., Gene, 231:1-13 (1999); Mills, et al., Proc. Natl. Acad. Sci. USA 95:3543-3548 (1998); Muir, et al., Proc. Natl. Acad. Sci. USA 95:6705-6710 (1998); Otomo, et al., Biochemistry 38:16040-16044 (1999); Otomo, et al., J. Biolmol. NMR 14:105-114 (1999); Scott, et al., Proc. Natl. Acad. Sci. USA 96:13638-13643 (1999); Severinov and Muir, J. Biol. Chem., 273:16205-16209 (1998); Shingledecker, et al., Gene, 207:187-195 (1998); Southworth, et al., EMBO J. 17:918-926 (1998); Southworth, et al., Biotechniques, 27:110-120 (1999); Wood, et al., Nat. Biotechnol., 17:889-892 (1999); Wu, et al., Proc. Natl. Acad. Sci. USA 95:9226-9231 (1998a); Wu, et al., Biochim Biophys Acta 1387:422-432 (1998b); Xu, et al., Proc. Natl. Acad. Sci. USA 96:388-393 (1999); Yamazaki, et al., J. Am. Chem. Soc., 120:5591-5592 (1998)). Each reference is incorporated herein by reference.

[0249] The term “ligand-dependent intein,” as used herein refers to an intein that comprises a ligand-binding domain. Typically, the ligand-binding domain is inserted into the amino acid sequence of the intein, resulting in a structure intein (N)—ligand-binding domain—intein (C). Typically, ligand-dependent inteins exhibit no or only minimal protein splicing activity in the absence of an appropriate ligand, and a marked increase of protein splicing activity in the presence of the ligand. In some embodiments, the ligand-dependent intein does not exhibit observable splicing activity in the absence of ligand but does exhibit splicing activity in the presence of the ligand. In some embodiments, the ligand-dependent intein exhibits an observable protein splicing activity in the absence of the ligand, and a protein splicing activity in the presence of an appropriate ligand that is at least 5 times, at least 10 times, at least 50 times, at least 100 times, at least 150 times, at least 200 times, at least 250 times, at least 500 times, at least 1000 times, at least 1500 times, at least 2000 times, at least 2500 times, at least 5000 times, at least 10000 times, at least 20000 times, at least 25000 times, at least 50000 times, at least 100000 times, at least 500000 times, or at least 1000000 times greater than the activity observed in the absence of the ligand. In some embodiments, the increase in activity is dose dependent over at least 1 order of magnitude, at least 2 orders of magnitude, at least 3 orders of magnitude, at least 4 orders of magnitude, or at least 5 orders of magnitude, allowing for fine-tuning of intein activity by adjusting the concentration of the ligand. Suitable ligand-dependent inteins are known in the art, and in include those provided below and those described in published U.S. Patent Application U.S. 2014/0065711 A1; Mootz et al., “Protein splicing triggered by a small molecule.” J. Am. Chem. Soc. 2002; 124, 9044-9045; Mootz et al., “Conditional protein splicing: a new tool to control protein structure and function in vitro and in vivo.” J. Am. Chem. Soc. 2003; 125, 10561-10569; Buskirk et al., Proc. Natl. Acad. Sci. USA. 2004; 101, 10505-10510); Skretas & Wood, “Regulation of protein activity with small-molecule-controlled inteins.” Protein Sci. 2005; 14, 523-532; Schwartz, et al., “Post-translational enzyme activation in an animal via optimized conditional protein splicing.” Nat. Chem. Biol. 2007; 3, 50-54; Peck et al., Chem. Biol. 2011; 18 (5), 619-630; the entire contents of each are hereby incorporated by reference. Exemplary sequences are as follows:

| NAME | SEQUENCE OF LIGAND-DEPENDENT INTEIN |
|---|---|
| 2-4 INTEIN: | CLAEGTRIFDPVTGTTHRIEDVVDGRKPIHVVAAAKDGTLLARPVVSWFDQGTRDVIGLRIAGGAIV |
| | WATPDHKVLTEYGWRAAGELRKGDRVAGPGGSGNSLALSLTADQMVSALLDAEPPILYSEYDPTSPF |
| | SEASMMGLLTNLADRELVHMINWAKRVPGFVDLTLHDQAHLLECAWLEILMIGLVWRSMEHPGKLLF |
| | APNLLLDRNQGKCVEGMVEIFDMLLATSSRFRMMNLQGEEFVCLKSIILLNSGVYTFLSSTLKSLEE |
| | KDHIHRALDKITDTLIHLMAKAGLTLQQQHQRLAQLLLILSHIRHMSNKGMEHLYSMKYKNVVPLYD |
| | LLLEMLDAHRLHAGGSGASRVQAFADALDDKFLHDMLAEELRYSVIREVLPTRRARTFDLEVEELHT |
| | LVAEGVVVHNC (SEQ ID NO: 305) |
| 3-2 INTEIN | CLAEGTRIFDPVTGTTHRIEDVVDGRKPIHVVAVAKDGTLLARPVVSWFDQGTRDVIGLRIAGGAIV |
| | WATPDHKVLTEYGWRAAGELRKGDRVAGPGGSGNSLALSLTADQMVSALLDAEPPILYSEYDPTSPF |
| | SEASMMGLLTNLADRELVHMINWAKRVPGFVDLTLHDQAHLLECAWLEILMIGLVWRSMEHPGKLLF |
| | APNLLLDRNQGKCVEGMVEIFDMLLATSSRFRMMNLQGEEFVCLKSIILLNSGVYTFLSSTLKSLEE |
| | KDHIHRALDKITDTLIHLMAKAGLTLQQQHQRLAQLLLILSHIRHMSNKGMEHLYSMKYTNVVPLYD |
| | LLLEMLDAHRLHAGGSGASRVQAFADALDDKFLHDMLAEELRYSVIREVLPTRRARTFDLEVEELHT |
| | LVAEGVVVHNC (SEQ ID NO: 306) |
| 30R3-1 INTEIN | CLAEGTRIFDPVTGTTHRIEDVVDGRKPIHVVAAAKDGTLLARPVVSWFDQGTRDVIGLRIAGGATV |
| | WATPDHKVLTEYGWRAAGELRKGDRVAGPGGSGNSLALSLTADQMVSALLDAEPPIPYSEYDPTSPF |
| | SEASMMGLLTNLADRELVHMINWAKRVPGFVDLTLHDQAHLLECAWLEILMIGLVWRSMEHPGKLLF |
| | APNLLLDRNQGKCVEGMVEIFDMLLATSSRFRMMNLQGEEFVCLKSIILLNSGVYTFLSSTLKSLEE |
| | KDHIHRALDKITDTLIHLMAKAGLTLQQQHQRLAQLLLILSHIRHMSNKGMEHLYSMKYKNVVPLYD |
| | LLLEMLDAHRLHAGGSGASRVQAFADALDDKFLHDMLAEGLRYSVIREVLPTRRARTFDLEVEELHT |
| | LVAEGVVVHNC (SEQ ID NO: 307) |
| 30R3-2 INTEIN | CLAEGTRIFDPVTGTTHRIEDVVDGRKPIHVVAAAKDGTLLARPVVSWFDQGTRDVIGLRIAGGATV |
| | WATPDHKVLTEYGWRAAGELRKGDRVAGPGGSGNSLALSLTADQMVSALLDAEPPILYSEYDPTSPF |
| | SEASMMGLLTNLADRELVHMINWAKRVPGFVDLTLHDQAHLLECAWLEILMIGLVWRSMEHPGKLLF |
| | APNLLLDRNQGKCVEGMVEIFDMLLATSSRFRMMNLQGEEFVCLKSIILLNSGVYTFLSSTLKSLEE |
| | KDHIHRALDKITDTLIHLMAKAGLTLQQQHQRLAQLLLILSHIRHMSNKGMEHLYSMKYKNVVPLYD |
| | LLLEMLDAHRLHAGGSGASRVQAFADALDDKFLHDMLAEELRYSVIREVLPTRRARTFDLEVEELHT |
| | LVAEGVVVHNC (SEQ ID NO: 308) |
| 30R3-3 INTEIN | CLAEGTRIFDPVTGTTHRIEDVVDGRKPIHVVAAAKDGTLLARPVVSWFDQGTRDVIGLRIAGGATV |
| | WATPDHKVLTEYGWRAAGELRKGDRVAGPGGSGNSLALSLTADQMVSALLDAEPPIPYSEYDPTSPF |
| | SEASMMGLLTNLADRELVHMINWAKRVPGFVDLTLHDQAHLLECAWLEILMIGLVWRSMEHPGKLLF |
| | APNLLLDRNQGKCVEGMVEIFDMLLATSSRFRMMNLQGEEFVCLKSIILLNSGVYTFLSSTLKSLEE |
| | KDHIHRALDKITDTLIHLMAKAGLTLQQQHQRLAQLLLILSHIRHMSNKGMEHLYSMKYKNVVPLYD |
| | LLLEMLDAHRLHAGGSGASRVQAFADALDDKFLHDMLAEELRYSVIREVLPTRRARTFDLEVEELHT |
| | LVAEGVVVHNC (SEQ ID NO: 309) |
| 37R3-1 INTEIN | CLAEGTRIFDPVTGTTHRIEDVVDGRKPIHVVAAAKDGTLLARPVVSWFDQGTRDVIGLRIAGGATV |
| | WATPDHKVLTEYGWRAAGELRKGDRVAGPGGSGNSLALSLTADQMVSALLDAEPPILYSEYNPTSPF |
| | SEASMMGLLTNLADRELVHMINWAKRVPGFVDLTLHDQAHLLERAWLEILMIGLVWRSMEHPGKLLF |
| | APNLLLDRNQGKCVEGMVEIFDMLLATSSRFRMMNLQGEEFVCLKSIILLNSGVYTFLSSTLKSLEE |
| | KDHIHRALDKITDTLIHLMAKAGLTLQQQHQRLAQLLLILSHIRHMSNKGMEHLYSMKYKNVVPLYD |
| | LLLEMLDAHRLHAGGSGASRVQAFADALDDKFLHDMLAEGLRYSVIREVLPTRRARTFDLEVEELHT |
| | LVAEGVVVHNC ((SEQ ID NO: 310) |
| 37R3-2 INTEIN | CLAEGTRIFDPVTGTTHRIEDVVDGRKPIHVVAAAKDGTLLARPVVSWFDQGTRDVIGLRIAGGAIV |
| | WATPDHKVLTEYGWRAAGELRKGDRVAGPGGSGNSLALSLTADQMVSALLDAEPPILYSEYDPTSPF |
| | SEASMMGLLTNLADRELVHMINWAKRVPGFVDLTLHDQAHLLERAWLEILMIGLVWRSMEHPGKLLF |
| | APNLLLDRNQGKCVEGMVEIFDMLLATSSRFRMMNLQGEEFVCLKSIILLNSGVYTFLSSTLKSLEE |
| | KDHIHRALDKITDTLIHLMAKAGLTLQQQHQRLAQLLLILSHIRHMSNKGMEHLYSMKYKNVVPLYD |
| | LLLEMLDAHRLHAGGSGASRVQAFADALDDKFLHDMLAEGLRYSVIREVLPTRRARTFDLEVEELHT |
| | LVAEGVVVHNC (SEQ ID NO: 311) |
| 37R3-3 INTEIN | CLAEGTRIFDPVTGTTHRIEDVVDGRKPIHVVAVAKDGTLLARPVVSWFDQGTRDVIGLRIAGGATV |
| | WATPDHKVLTEYGWRAAGELRKGDRVAGPGGSGNSLALSLTADQMVSALLDAEPPILYSEYDPTSPF |
| | SEASMMGLLTNLADRELVHMINWAKRVPGFVDLTLHDQAHLLERAWLEILMIGLVWRSMEHPGKLLF |
| | APNLLLDRNQGKCVEGMVEIFDMLLATSSRFRMMNLQGEEFVCLKSIILLNSGVYTFLSSTLKSLEE |
| | KDHIHRALDKITDTLIHLMAKAGLTLQQQHQRLAQLLLILSHIRHMSNKGMEHLYSMKYKNVVPLYD |
| | LLLEMLDAHRLHAGGSGASRVQAFADALDDKFLHDMLAEELRYSVIREVLPTRRARTFDLEVEELHT |
| | LVAEGVVVHNC (SEQ ID NO: 312) |

### Linker

[0250] The term “linker,” as used herein, refers to a molecule linking two other molecules or moieties. The linker can be an amino acid sequence in the case of a linker joining two fusion proteins. For example, a CP-Cas9 can be fused to a cytidine deaminase or an adenosine deaminase by an amino acid linker sequence. In another example, the linker may be an amino acid sequence that joins the C-terminal portion to the N-terminal portion of a circularly permuted Cas9. The linker can also be a nucleotide sequence in the case of joining two nucleotide sequences together. For example, in the instant case, the traditional guide RNA is linked via a spacer or linker nucleotide sequence to the RNA extension of an extended guide RNA which may comprise a RT template sequence and an RT primer binding site. In other embodiments, the linker is an organic molecule, group, polymer, or chemical moiety. In some embodiments, the linker is 5-100 amino acids in length, for example, 5, 6, 7, 8, 9, 10, 11, 12, 13, 14, 15, 16, 17, 18, 19, 20, 21, 22, 23, 24, 25, 26, 27, 28, 29, 30, 30-35, 35-40, 40-45, 45-50, 50-60, 60-70, 70-80, 80-90, 90-100, 100-150, or 150-200 amino acids in length. Longer or shorter linkers are also contemplated.

### Mutation

[0251] The term “mutation,” as used herein, refers to a substitution of a residue within a sequence, e.g., a nucleic acid or amino acid sequence, with another residue, or a deletion or insertion of one or more residues within a sequence. Mutations are typically described herein by identifying the original residue followed by the position of the residue within the sequence and by the identity of the newly substituted residue. Various methods for making the amino acid substitutions (mutations) provided herein are well known in the art, and are provided by, for example, Green and Sambrook, Molecular Cloning: A Laboratory Manual (4^{th} ed., Cold Spring Harbor Laboratory Press, Cold Spring Harbor, N.Y. (2012)). Mutations can include a variety of categories, such as single base polymorphisms, microduplication regions, indel, and inversions, and is not meant to be limiting in any way. Mutations can include “loss-of-function” mutations which is the normal result of a mutation that reduces or abolishes a protein activity. Most loss-of-function mutations are recessive, because in a heterozygote the second chromosome copy carries an unmutated version of the gene coding for a fully functional protein whose presence compensates for the effect of the mutation. There are some exceptions where a loss-of-function mutation is dominant, one example being haploinsufficiency, where the organism is unable to tolerate the approximately 50% reduction in protein activity suffered by the heterozygote. This is the explanation for a few genetic diseases in humans, including Marfan syndrome which results from a mutation in the gene for the connective tissue protein called fibrillin. Mutations also embrace “gain-of-function” mutations, which is one which confers an abnormal activity on a protein or cell that is otherwise not present in a normal condition. Many gain-of-function mutations are in regulatory sequences rather than in coding regions, and can therefore have a number of consequences. For example, a mutation might lead to one or more genes being expressed in the wrong tissues, these tissues gaining functions that they normally lack. Alternatively the mutation could lead to overexpression of one or more genes involved in control of the cell cycle, thus leading to uncontrolled cell division and hence to cancer. Because of their nature, gain-of-function mutations are usually dominant.

napDNAbp

[0252] The term “napDNAb” which stand for “nucleic acid programmable DNA binding protein” refers to any protein that may associate (e.g., form a complex) with one or more nucleic acid molecules (i.e., which may broadly be referred to as a “napDNAbp-programming nucleic acid molecule” and includes, for example, guide RNA in the case of Cas systems) which direct or otherwise program the protein to localize to a specific target nucleotide sequence (e.g., a gene locus of a genome) that is complementary to the one or more nucleic acid molecules (or a portion or region thereof) associated with the protein, thereby causing the protein to bind to the nucleotide sequence at the specific target site. This term napDNAbp embraces CRISPR-Cas9 proteins, as well as Cas9 equivalents, homologs, orthologs, or paralogs, whether naturally occurring or non-naturally occurring (e.g., engineered or modified), and may include a Cas9 equivalent from any type of CRISPR system (e.g., type II, V, VI), including Cpf1 (a type-V CRISPR-Cas systems), C2c1 (a type V CRISPR-Cas system), C2c2 (a type VI CRISPR-Cas system), C2c3 (a type V CRISPR-Cas system), dCas9, GeoCas9, CjCas9, Cas12a, Cas12b, Cas12c, Cas12d, Cas12g, Cas12h, Cas12i, Cas13d, Cas14, Argonaute, and nCas9. Further Cas-equivalents are described in Makarova et al., “C2c2 is a single-component programmable RNA-guided RNA-targeting CRISPR effector,” Science 2016; 353 (6299), the contents of which are incorporated herein by reference. However, the nucleic acid programmable DNA binding protein (napDNAbp) that may be used in connection with this invention are not limited to CRISPR-Cas systems. The invention embraces any such programmable protein, such as the Argonaute protein from Natronobacterium gregoryi (NgAgo) which may also be used for DNA-guided genome editing. NgAgo-guide DNA system does not require a PAM sequence or guide RNA molecules, which means genome editing can be performed simply by the expression of generic NgAgo protein and introduction of synthetic oligonucleotides on any genomic sequence. See Gao et al., DNA-guided genome editing using the Natronobacterium gregoryi Argonaute. Nature Biotechnology 2016; 34(7):768-73, which is incorporated herein by reference.

[0253] In some embodiments, the napDNAbp is a RNA-programmable nuclease, when in a complex with an RNA, may be referred to as a nuclease:RNA complex. Typically, the bound RNA(s) is referred to as a guide RNA (gRNA). gRNAs can exist as a complex of two or more RNAs, or as a single RNA molecule. gRNAs that exist as a single RNA molecule may be referred to as single-guide RNAs (sgRNAs), though “gRNA” is used interchangeably to refer to guide RNAs that exist as either single molecules or as a complex of two or more molecules. Typically, gRNAs that exist as single RNA species comprise two domains: (1) a domain that shares homology to a target nucleic acid (e.g., and directs binding of a Cas9 (or equivalent) complex to the target); and (2) a domain that binds a Cas9 protein. In some embodiments, domain (2) corresponds to a sequence known as a tracrRNA, and comprises a stem-loop structure. For example, in some embodiments, domain (2) is homologous to a tracrRNA as depicted in FIG. 1E of Jinek et al., Science 337:816-821(2012), the entire contents of which is incorporated herein by reference. Other examples of gRNAs (e.g., those including domain 2) can be found in U.S. Pat. No. 9,340,799, entitled “mRNA-Sensing Switchable gRNAs,” and International Patent Application No. PCT/US2014/054247, filed Sep. 6, 2013, published as WO 2015/035136 and entitled “Delivery System For Functional Nucleases,” the entire contents of each are herein incorporated by reference. In some embodiments, a gRNA comprises two or more of domains (1) and (2), and may be referred to as an “extended gRNA.” For example, an extended gRNA will, e.g., bind two or more Cas9 proteins and bind a target nucleic acid at two or more distinct regions, as described herein. The gRNA comprises a nucleotide sequence that complements a target site, which mediates binding of the nuclease/RNA complex to said target site, providing the sequence specificity of the nuclease:RNA complex. In some embodiments, the RNA-programmable nuclease is the (CRISPR-associated system) Cas9 endonuclease, for example Cas9 (Csn1) from Streptococcus pyogenes (see, e.g., “Complete genome sequence of an M1 strain of Streptococcus pyogenes.” Ferretti J. J. et al., Proc. Natl. Acad. Sci. U.S.A. 98:4658-4663(2001); “CRISPR RNA maturation by trans-encoded small RNA and host factor RNase III.” Deltcheva E. et al., Nature 471:602-607(2011); and “A programmable dual-RNA-guided DNA endonuclease in adaptive bacterial immunity.” Jinek M. et al., Science 337:816-821(2012), the entire contents of each of which are incorporated herein by reference.

[0254] The napDNAbp nucleases (e.g., Cas9) use RNA:DNA hybridization to target DNA cleavage sites, these proteins are able to be targeted, in principle, to any sequence specified by the guide RNA. Methods of using napDNAbp nucleases, such as Cas9, for site-specific cleavage (e.g., to modify a genome) are known in the art (see e.g., Cong, L. et al. Multiplex genome engineering using CRISPR/Cas systems. Science 339, 819-823 (2013); Mali, P. et al. RNA-guided human genome engineering via Cas9. Science 339, 823-826 (2013); Hwang, W. Y. et al. Efficient genome editing in zebrafish using a CRISPR-Cas system. Nature Biotechnology 31, 227-229 (2013); Jinek, M. et al. RNA-programmed genome editing in human cells. eLife 2, e00471 (2013); Dicarlo, J. E. et al., Genome engineering in Saccharomyces cerevisiae using CRISPR-Cas systems. Nucleic Acid Res. (2013); Jiang, W. et al. RNA-guided editing of bacterial genomes using CRISPR-Cas systems. Nature Biotechnology 31, 233-239 (2013); the entire contents of each of which are incorporated herein by reference).

napDNA/RNAbp

[0255] As used herein, reference to “napDNA/RNAbp” takes the same meaning as “napDNAbp” except that the protein is capable of binding to a DNA or an RNA molecule target, or both.

### Nickase

[0256] The term “nickase” refers to a Cas9 with one of the two nuclease domains inactivated. This enzyme is capable of cleaving only one strand of a target DNA.

### Nuclear Localization Signal

[0257] A nuclear localization signal or sequence (NLS) is an amino acid sequence that tags, designates, or otherwise marks a protein for import into the cell nucleus by nuclear transport. Typically, this signal consists of one or more short sequences of positively charged lysines or arginines exposed on the protein surface. Different nuclear localized proteins may share the same NLS. An NLS has the opposite function of a nuclear export signal (NES), which targets proteins out of the nucleus. Thus, a single nuclear localization signal can direct the entity with which it is associated to the nucleus of a cell. Such sequences can be of any size and composition, for example more than 25, 25, 15, 12, 10, 8, 7, 6, 5 or 4 amino acids, but will preferably comprise at least a four to eight amino acid sequence known to function as a nuclear localization signal (NLS).

### Nucleic Acid Molecule

[0258] The term “nucleic acid,” as used herein, refers to a polymer of nucleotides. The polymer may include natural nucleosides (i.e., adenosine, thymidine, guano sine, cytidine, uridine, deoxyadenosine, deoxythymidine, deoxyguanosine, and deoxycytidine), nucleoside analogs (e.g., 2-aminoadenosine, 2-thiothymidine, inosine, pyrrolo-pyrimidine, 3-methyl adenosine, 5-methylcytidine, C5 bromouridine, C5 fluorouridine, C5 iodouridine, C5 propynyl uridine, C5 propynyl cytidine, C5 methylcytidine, 7 deazaadenosine, 7 deazaguanosine, 8 oxoadenosine, 8 oxoguanosine, O(6) methylguanine, 4-acetylcytidine, 5-(carboxyhydroxymethyl)uridine, dihydrouridine, methylpseudouridine, 1-methyl adenosine, 1-methyl guanosine, N6-methyl adenosine, and 2-thiocytidine), chemically modified bases, biologically modified bases (e.g., methylated bases), intercalated bases, modified sugars (e.g., 2′-fluororibose, ribose, 2′-deoxyribose, 2′-O-methylcytidine, arabinose, and hexose), or modified phosphate groups (e.g., phosphorothioates and 5′ N phosphoramidite linkages).

### Off-Target Activity

[0259] The term “off-target activity” refers to Cas9 activity at undesired locations due to gRNA targeting sequence with sufficient homology to recruit Cas9 to unintended genomic locations.

### On-Target Activity

[0260] The term “on-target activity” refers to Cas9 activity at a desired location specified by a gRNA targeting sequence.

### Promoter

[0261] The term “promoter” is art-recognized and refers to a nucleic acid molecule with a sequence recognized by the cellular transcription machinery and able to initiate transcription of a downstream gene. A promoter can be constitutively active, meaning that the promoter is always active in a given cellular context, or conditionally active, meaning that the promoter is only active in the presence of a specific condition. For example, a conditional promoter may only be active in the presence of a specific protein that connects a protein associated with a regulatory element in the promoter to the basic transcriptional machinery, or only in the absence of an inhibitory molecule. A subclass of conditionally active promoters are inducible promoters that require the presence of a small molecule “inducer” for activity. Examples of inducible promoters include, but are not limited to, arabinose-inducible promoters, Tet-on promoters, and tamoxifen-inducible promoters. A variety of constitutive, conditional, and inducible promoters are well known to the skilled artisan, and the skilled artisan will be able to ascertain a variety of such promoters useful in carrying out the instant invention, which is not limited in this respect.

### Protein, Peptide, and Polypeptide

[0262] The terms “protein,” “peptide,” and “polypeptide” are used interchangeably herein, and refer to a polymer of amino acid residues linked together by peptide (amide) bonds. The terms refer to a protein, peptide, or polypeptide of any size, structure, or function. Typically, a protein, peptide, or polypeptide will be at least three amino acids long. A protein, peptide, or polypeptide may refer to an individual protein or a collection of proteins. One or more of the amino acids in a protein, peptide, or polypeptide may be modified, for example, by the addition of a chemical entity such as a carbohydrate group, a hydroxyl group, a phosphate group, a farnesyl group, an isofarnesyl group, a fatty acid group, a linker for conjugation, functionalization, or other modification, etc. A protein, peptide, or polypeptide may also be a single molecule or may be a multi-molecular complex. A protein, peptide, or polypeptide may be just a fragment of a naturally occurring protein or peptide. A protein, peptide, or polypeptide may be naturally occurring, recombinant, or synthetic, or any combination thereof. Any of the proteins provided herein may be produced by any method known in the art. For example, the proteins provided herein may be produced via recombinant protein expression and purification, which is especially suited for fusion proteins comprising a peptide linker. Methods for recombinant protein expression and purification are well known, and include those described by Green and Sambrook, Molecular Cloning: A Laboratory Manual (4th ed., Cold Spring Harbor Laboratory Press, Cold Spring Harbor, N.Y. (2012)), the entire contents of which are incorporated herein by reference.

### Protospacer

[0263] As used herein, the term “protospacer” refers to the sequence (˜20 bp) in DNA adjacent to the PAM (protospacer adjacent motif) sequence which shares the same sequence as the spacer sequence of the guide RNA, and which is complementary to the target sequence in the non-PAM strand. The spacer sequence of the guide RNA anneals to the target sequence located in the non-PAM strand. In order for Cas9 to function it also requires a specific protospacer adjacent motif (PAM) that varies depending on the bacterial species of the Cas9 gene. The most commonly used Cas9 nuclease, derived from S. pyogenes, recognizes a PAM sequence of NGG that is found directly downstream of the protospacer sequence in the genomic DNA, on the non-target strand.

### Protospacer Adjacent Motif (PAM) Sequence

[0264] As used herein, the term “protospacer adjacent sequence” or “PAM” refers to an approximately 2-6 base pair DNA sequence that is an important targeting component of a Cas9 nuclease. Typically, the PAM sequence is on either strand, and is downstream in the 5′ to 3′ direction of a Cas9 cut site. The canonical PAM sequence (i.e., the PAM sequence that is associated with the Cas9 nuclease of Streptococcus pyogenes or SpCas9) is 5′-NGG-3′ wherein “N” is any nucleobase followed by two guanine (“G”) nucleobases. Different PAM sequences can be associated with different Cas9 nucleases or equivalent proteins from different organisms. In addition, any given Cas9 nuclease, e.g., SpCas9, may be modified to alter the PAM specificity of the nuclease such that the nuclease recognizes alternative PAM sequence.

[0265] For example, with reference to the canonical SpCas9 (e.g., SEQ ID NO: 1), the PAM sequence can be modified by introducing one or more mutations, including (a) D1135V, R1335Q, and T1337R “the VQR variant”, which alters the PAM specificity to NGAN or NGNG, (b) D1135E, R1335Q, and T1337R “the EQR variant”, which alters the PAM specificity to NGAG, and (c) D1135V, G1218R, R1335E, and T1337R “the VRER variant”, which alters the PAM specificity to NGCG. In addition, the D1135E variant of canonical SpCas9 still recognizes NGG, but it is more selective compared to the wild type SpCas9 protein.

[0266] It will also be appreciated that Cas9 enzymes from different bacterial species (i.e., Cas9 orthologs) can have varying PAM specificities. For example, Cas9 from Staphylococcus aureus (SaCas9) recognizes NGRRT or NGRRN. In addition, Cas9 from Neisseria meningitis (NmCas) recognizes NNNNGATT. In another example, Cas9 from Streptococcus thermophilis (StCas9) recognizes NNAGAAW. In still another example, Cas9 from Treponema denticola (TdCas) recognizes NAAAAC. These are example are not meant to be limiting. It will be further appreciated that non-SpCas9s bind a variety of PAM sequences, which makes them useful when no suitable SpCas9 PAM sequence is present at the desired target cut site. Furthermore, non-SpCas9s may have other characteristics that make them more useful than SpCas9. For example, Cas9 from Staphylococcus aureus (SaCas9) is about 1 kilobase smaller than SpCas9, so it can be packaged into adeno-associated virus (AAV). Further reference may be made to Shah et al., “Protospacer recognition motifs: mixed identities and functional diversity,” RNA Biology, 10(5): 891-899 (which is incorporated herein by reference).

### Sense Strand

[0267] In genetics, a “sense” strand is the segment within double-stranded DNA that runs from 5′ to 3′, and which is complementary to the antisense strand of DNA, or template strand, which runs from 3′ to 5′. In the case of a DNA segment that encodes a protein, the sense strand is the strand of DNA that has the same sequence as the mRNA, which takes the antisense strand as its template during transcription, and eventually undergoes (typically, not always) translation into a protein. The antisense strand is thus responsible for the RNA that is later translated to protein, while the sense strand possesses a nearly identical makeup to that of the mRNA. Note that for each segment of dsDNA, there will possibly be two sets of sense and antisense, depending on which direction one reads (since sense and antisense is relative to perspective). It is ultimately the gene product, or mRNA, that dictates which strand of one segment of dsDNA is referred to as sense or antisense.

### Subject

[0268] The term “subject,” as used herein, refers to an individual organism, for example, an individual mammal. In some embodiments, the subject is a human. In some embodiments, the subject is a non-human mammal. In some embodiments, the subject is a non-human primate. In some embodiments, the subject is a rodent. In some embodiments, the subject is a sheep, a goat, a cow, a cat, or a dog. In some embodiments, the subject is a vertebrate, an amphibian, a reptile, a fish, an insect, a fly, or a nematode. In some embodiments, the subject is a research animal. In some embodiments, the subject is genetically engineered, e.g., a genetically engineered non-human subject. The subject may be of either sex and at any stage of development.

### Target Site or Target Sequence

[0269] The term “target site” refers to a sequence within a nucleic acid molecule that is edited by a CP-Cas9 base editor disclosed herein. The target site further refers to the sequence within a nucleic acid molecule to which a complex of the base editor and gRNA binds. Typically, the target site is a sequence that includes the unique ˜20 bp target specified by the gRNA plus the genomic PAM sequence. CRISPR-Cas9 mechanisms recognize DNA targets that are complementary to a short CRISPR sgRNA sequence. The part of the sgRNA sequence that is complementary to the target sequence is known as a protospacer. In order for Cas9 to function it also requires a specific protospacer adjacent motif (PAM) that varies depending on the bacterial species of the Cas9 gene. The most commonly used Cas9 nuclease, derived from S. pyogenes, recognizes a PAM sequence of NGG that is found directly downstream of the target sequence in the genomic DNA, on the non-target strand.

### Transitions

[0270] As used herein, “transitions” refer to the interchange of purine nucleobases (A↔G) or the interchange of pyrimidine nucleobases (C↔T). This class of interchanges involves nucleobases of similar shape. The compositions and methods disclosed herein are capable of inducing one or more transitions in a target DNA molecule. The compositions and methods disclosed herein are also capable of inducing both transitions and transversion in the same target DNA molecule. These changes involve A↔G, G↔A, C↔T, or T↔C. In the context of a double-strand DNA with Watson-Crick paired nucleobases, transversions refer to the following base pair exchanges: A:T↔G:C, G:G↔A:T, C:G↔T:A, or T:A↔C:G. The compositions and methods disclosed herein are capable of inducing one or more transitions in a target DNA molecule. The compositions and methods disclosed herein are also capable of inducing both transitions and transversion in the same target DNA molecule, as well as other nucleotide changes, including deletions and insertions.

### Transversions

[0271] As used herein, “transversions” refer to the interchange of purine nucleobases for pyrimidine nucleobases, or in the reverse and thus, involve the interchange of nucleobases with dissimilar shape. These changes involve T↔A, T↔G, C↔G, C↔A, A↔T, A↔C, G↔C, and G↔T. In the context of a double-strand DNA with Watson-Crick paired nucleobases, transversions refer to the following base pair exchanges: T:A↔A:T, T:A↔G:C, C:G↔G:C, C:G↔A:T, A:T↔T:A, A:T↔C:G, G:C↔C:G, and G:C↔T:A. The compositions and methods disclosed herein are capable of inducing one or more transversions in a target DNA molecule. The compositions and methods disclosed herein are also capable of inducing both transitions and transversion in the same target DNA molecule, as well as other nucleotide changes, including deletions and insertions.

### Treatment

[0272] The terms “treatment,” “treat,” and “treating,” refer to a clinical intervention aimed to reverse, alleviate, delay the onset of, or inhibit the progress of a disease or disorder, or one or more symptoms thereof, as described herein. As used herein, the terms “treatment,” “treat,” and “treating” refer to a clinical intervention aimed to reverse, alleviate, delay the onset of, or inhibit the progress of a disease or disorder, or one or more symptoms thereof, as described herein. In some embodiments, treatment may be administered after one or more symptoms have developed and/or after a disease has been diagnosed. In other embodiments, treatment may be administered in the absence of symptoms, e.g., to prevent or delay onset of a symptom or inhibit onset or progression of a disease. For example, treatment may be administered to a susceptible individual prior to the onset of symptoms (e.g., in light of a history of symptoms and/or in light of genetic or other susceptibility factors). Treatment may also be continued after symptoms have resolved, for example, to prevent or delay their recurrence.

### Uracil Glycosylase Inhibitor

[0273] The term “uracil glycosylase inhibitor” or “UGI,” as used herein, refers to a protein that is capable of inhibiting a uracil-DNA glycosylase base-excision repair enzyme. In some embodiments, a UGI domain comprises a wild-type UGI or a UGI as set forth in SEQ ID NO: 313. In some embodiments, the UGI proteins provided herein include fragments of UGI and proteins homologous to a UGI or a UGI fragment. For example, in some embodiments, a UGI domain comprises a fragment of the amino acid sequence set forth in SEQ ID NO: 313. In some embodiments, a UGI fragment comprises an amino acid sequence that comprises at least 60%, at least 65%, at least 70%, at least 75%, at least 80%, at least 85%, at least 90%, at least 95%, at least 96%, at least 97%, at least 98%, at least 99%, or at least 99.5% of the amino acid sequence as set forth in SEQ ID NO: 313. In some embodiments, a UGI comprises an amino acid sequence homologous to the amino acid sequence set forth in SEQ ID NO: 313, or an amino acid sequence homologous to a fragment of the amino acid sequence set forth in SEQ ID NO: 313. In some embodiments, proteins comprising UGI or fragments of UGI or homologs of UGI or UGI fragments are referred to as “UGI variants.” A UGI variant shares homology to UGI, or a fragment thereof. For example a UGI variant is at least 70% identical, at least 75% identical, at least 80% identical, at least 85% identical, at least 90% identical, at least 95% identical, at least 96% identical, at least 97% identical, at least 98% identical, at least 99% identical, at least 99.5% identical, or at least 99.9% identical to a wild type UGI or a UGI as set forth in SEQ ID NO: 313. In some embodiments, the UGI variant comprises a fragment of UGI, such that the fragment is at least 70% identical, at least 80% identical, at least 90% identical, at least 95% identical, at least 96% identical, at least 97% identical, at least 98% identical, at least 99% identical, at least 99.5% identical, or at least 99.9% to the corresponding fragment of wild-type UGI or a UGI as set forth in SEQ ID NO: 313. In some embodiments, the UGI comprises the following amino acid sequence:

(SEQ ID NO: 313)
MTNLSDIIEKETGKQLVIQESILMLPEEVEEVIGNKPESDILVHTAYDEST
DENVMLLTSDAPEYKPWALVIQDSNGENKIKML
(P14739|UNGI_BPPB2 Uracil-DNA glycosylase
inhibitor).

### Variant

[0274] As used herein the term “variant” should be taken to mean the exhibition of qualities that have a pattern that deviates from what occurs in nature, e.g., a variant Cas9 is a Cas9 comprising one or more changes in amino acid residues as compared to a wild type Cas9 amino acid sequence. The term “variant” encompasses homologous proteins having at least 75%, or at least 80%, or at least 85%, or at least 90%, or at least 95%, or at least 99% percent identity with a reference sequence and having the same or substantially the same functional activity or activities as the reference sequence. The term also encompasses circular permutants, mutants, trunctations, or domains of a reference sequence, and which display the same or substantially the same functional activity or activities as the reference sequence.

### Vector

[0275] The term “vector,” as used herein, refers to a nucleic acid that can be modified to encode a gene of interest and that is able to enter into a host cell, mutate and replicate within the host cell, and then transfer a replicated form of the vector into another host cell. Exemplary suitable vectors include viral vectors, such as retroviral vectors or bacteriophages and filamentous phage, and conjugative plasmids. Additional suitable vectors will be apparent to those of skill in the art based on the instant disclosure.

### Wild Type

[0276] As used herein the term “wild type” is a term of the art understood by skilled persons and means the typical form of an organism, strain, gene or characteristic as it occurs in nature as distinguished from mutant or variant forms.

### DETAILED DESCRIPTION OF CERTAIN EMBODIMENTS

[0277] The present inventors have constructed novel ABEs and CBEs that have (a) expanded PAM capabilities and (b) enhanced editing windows within and outside of the protospacer sequence. These properties are unexpected and not predictable from existing knowledge. More in particular, the present disclosure provides improved adenosine base editors (ABE) that have an expanded range of PAM sequence recognition capability (i.e., recognition of non-canonical 5′NGG3′ PAM sequence). In addition, the present disclosure provides improved cytidine base editors (CBE) and adenosine base editors (ABE) comprising circular permutant variants of Cas9 (CP-Cas9) with an increased window of base editing within the protospacer sequence (e.g., from about 4-5 nucleotides to up to about 8-9 nucleotides) and even outside of the protospacer sequence. These improved constructs expand the scope of genome and base editing and have surprisingly and/or unexpected characteristics, including higher product purities, expanded editing windows within and outside of the protospacer sequence, and expanded PAM compatibility.

[0278] In addition, the instant specification provides for nucleic acid molecules encoding and/or expressing the improved ABE and CBE base editors as described herein, as well as expression vectors or constructs for expressing the improved base editors described herein, host cells comprising said nucleic acid molecules and expression vectors, and compositions for delivering and/or administering nucleic acid-based embodiments described herein. In addition, the disclosure provides for isolated base editors, as well as compositions comprising said isolated base editors as described herein. Still further, the present disclosure provides for methods of making the disclosed base editors, as well as methods of using the base editors or nucleic acid molecules encoding the base editors in applications including editing a nucleic acid molecule, e.g., a genome, with improved efficiency as compared to base editor that forms the state of the art, preferably in a manner that expands the editing window within and outside of the protospacer sequence, expands PAM capatibility, and increases product purity (i.e., improves the proportion of the desired edit).

Circularly Permutant napDNAbps

[0279] In various aspects, the improved ABEs and CBEs disclosed herein comprise a circularly permuted napDNAbp, such as a circular permutant of Cas9 or a variant of Cas9.

[0280] As used herein, the term “circular permutant” refers to a protein or polypeptide (e.g., a Cas9) comprising a circular permutation, which is change in the protein's structural configuration involving a change in order of amino acids appearing in the protein's amino acid sequence. Such proteins may also be referred to as “circularly permuted.” In other words, circular permutants are proteins that have altered N- and C-termini as compared to a wild-type counterpart, e.g., the wild-type C-terminal half of a protein becomes the new N-terminal half. Circular permutation (or CP) is essentially the topological rearrangement of a protein's primary sequence, connecting its N- and C-terminus, often with a peptide linker, while concurrently splitting its sequence at a different position to create new, adjacent N- and C-termini. The result is a protein structure with different connectivity, but which often can have the same overall similar three-dimensional (3D) shape, and possibly include improved or altered characteristics, including, reduced proteolytic susceptibility, improved catalytic activity, altered substrate or ligand binding, and/or improved thermostability. Circular permutant proteins can occur in nature (e.g., concanavalin A and lectin). In addition, circular permutation can occur as a result of posttranslational modifications or may be engineered using recombinant techniques. Exemplary circular permutant Cas9 variants were described in Oakes et al., “CRISPR-Cas9

[0281] The ABEs and CBEs described herein can include a circular permutant of Cas9 or a variant of Cas9. Exemplary circular permutant variants of Cas9 were described in Oakes et al., “Circular permutants as programmable scaffolds for genome modification,” Cell, 176, pp. 254-267 (Jan. 10, 2019), the contents of which are incorporated herein by reference. In addition, reference can be made to the exemplary circular permutant Cas9s described in US 2019/0233847, the contents of which are incorporated herein by reference.

[0282] The term “circularly permuted Cas9” refers to any Cas9 protein, or variant thereof, that has been occurs as a circular permutant, whereby its N- and C-termini have been topically rearranged or reordered, but wherein the primary amino acid sequence of each reordered portion remains the same and the overall tertiary structure of protein is generally the same. For example, in the case of a 1300 amino acid Cas9 polypeptide, amino acids 1-801 (i.e., the native N-terminal portion) could be relocated to the C-terminus of the Cas9 polypeptide. The resulting circular permutant Cas9 comprises a rearranged primary structure comprising (using original residue numbering) amino acids 802-1300 forming the new N-terminal half and amino acids 1-801 forming the new C-terminal half. In this example, the original N-terminal portion and the original C-terminal portion are reordered such that the original N-terminal portion becomes the new C-terminal portion, and vice versa. The local primary structure or sequence of each original N-terminal and C-terminal half do not change in their relative positions to one another. In addition, the overall tertiary structure of the polypeptide is generally conserved. Such circularly permuted Cas9 proteins (“CP-Cas9”), or variants thereof, retain the ability to bind DNA when complexed with a guide RNA (gRNA). The instant disclosure contemplates any previously known CP-Cas9 or use a new CP-Cas9 so long as the resulting circularly permutant protein retains the ability to bind DNA when complexed with a guide RNA (gRNA).

[0283] In addition to those CP-Cas9s described herein, one of ordinary skill in the art also may reconfigure any other Cas9 protein described herein, including any variant, ortholog, or naturally occurring Cas9 or equivalent thereof, as a circular permutant variant. The recombinant techniques for making such reconfigurations are well known in the art.

[0284] In various embodiments of the herein disclosed ABE and CBE editors, the circular permutants of Cas9 may have the following structure:

[0285] N-terminus-[original C-terminus]-[optional linker]-[original N-terminus]-C-terminus.

[0286] As an example, the present disclosure contemplates the following circular permutants of S. pyogenes Cas9 (1368 amino acids of UniProtKB—Q99ZW2 (CAS9_STRP1) (numbering is based on the amino acid position in SEQ ID NO: 1)):

[0287] N-terminus-[1268-1368]-[optional linker]-[1-1267]-C-terminus;

[0288] N-terminus-[1168-1368]-[optional linker]-[1-1167]-C-terminus;

[0289] N-terminus-[1068-1368]-[optional linker]-[1-1067]-C-terminus;

[0290] N-terminus-[968-1368]-[optional linker]-[1-967]-C-terminus;

[0291] N-terminus-[868-1368]-[optional linker]-[1-867]-C-terminus;

[0292] N-terminus-[768-1368]-[optional linker]-[1-767]-C-terminus;

[0293] N-terminus-[668-1368]-[optional linker]-[1-667]-C-terminus;

[0294] N-terminus-[568-1368]-[optional linker]-[1-567]-C-terminus;

[0295] N-terminus-[468-1368]-[optional linker]-[1-467]-C-terminus;

[0296] N-terminus-[368-1368]-[optional linker]-[1-367]-C-terminus;

[0297] N-terminus-[268-1368]-[optional linker]-[1-267]-C-terminus;

[0298] N-terminus-[168-1368]-[optional linker]-[1-167]-C-terminus;

[0299] N-terminus-[68-1368]-[optional linker]-[1-67]-C-terminus; or

[0300] N-terminus-[10-1368]-[optional linker]-[1-9]-C-terminus, or the corresponding circular permutants of other Cas9 proteins (including other Cas9 orthologs, variants, etc).

[0301] In particular embodiments, the herein disclosed ABE and CBE editors may comprise a circular permuant Cas9 that has the following structure (based on S. pyogenes Cas9 (1368 amino acids of UniProtKB—Q99ZW2 (CAS9_STRP1) (numbering is based on the amino acid position in SEQ ID NO: 1):

[0302] N-terminus-[102-1368]-[optional linker]-[1-101]-C-terminus;

[0303] N-terminus-[1028-1368]-[optional linker]-[1-1027]-C-terminus;

[0304] N-terminus-[1041-1368]-[optional linker]-[1-1043]-C-terminus;

[0305] N-terminus-[1249-1368]-[optional linker]-[1-1248]-C-terminus; or

[0306] N-terminus-[1300-1368]-[optional linker]-[1-1299]-C-terminus, or the corresponding circular permutants of other Cas9 proteins (including other Cas9 orthologs, variants, etc).

[0307] In still other embodiments, the herein disclosed ABE and CBE editors may comprise a circular permuant Cas9 having the following structure (based on S. pyogenes Cas9 (1368 amino acids of UniProtKB—Q99ZW2 (CAS9_STRP1) (numbering is based on the amino acid position in SEQ ID NO: 1):

[0308] N-terminus-[103-1368]-[optional linker]-[1-102]-C-terminus;

[0309] N-terminus-[1029-1368]-[optional linker]-[1-1028]-C-terminus;

[0310] N-terminus-[1042-1368]-[optional linker]-[1-1041]-C-terminus;

[0311] N-terminus-[1250-1368]-[optional linker]-[1-1249]-C-terminus; or

[0312] N-terminus-[1301-1368]-[optional linker]-[1-1300]-C-terminus, or the corresponding circular permutants of other Cas9 proteins (including other Cas9 orthologs, variants, etc).

[0313] In some embodiments, a circular permutant Cas9 variant can be formed by linking a C-terminal fragment of a Cas9 to an N-terminal fragment of a Cas9, either directly or by using a linker, such as an amino acid linker. Any suitable linker sequence disclosed herein or otherwise obtainable may be used to join N-terminal and C-terminal portions of a CP-Cas9. In some embodiments, The C-terminal fragment may correspond to the C-terminal 95% or more of the amino acids of a Cas9 (e.g., amino acids about 1300-1368), or the C-terminal 90%, 85%, 80%, 75%, 70%, 65%, 60%, 55%, 50%, 45%, 40%, 35%, 30%, 25%, 20%, 15%, 10%, or 5% or more of a Cas9 (e.g., any one of SEQ ID NOs: 300-304). The N-terminal portion may correspond to the N-terminal 95% or more of the amino acids of a Cas9 (e.g., amino acids about 1-1300), or the N-terminal 90%, 85%, 80%, 75%, 70%, 65%, 60%, 55%, 50%, 45%, 40%, 35%, 30%, 25%, 20%, 15%, 10%, or 5% or more of a Cas9 (e.g., of SEQ ID NO: 1).

[0314] In some embodiments, the circular permutant can be formed by linking a C-terminal fragment of a Cas9 to an N-terminal fragment of a Cas9, either directly or by using a linker, such as an amino acid linker. In some embodiments, the C-terminal fragment that is rearranged to the N-terminus, includes or corresponds to the C-terminal 30% or less of the amino acids of a Cas9 (e.g., amino acids 1012-1368 of SEQ ID NO: 1). In some embodiments, the C-terminal fragment that is rearranged to the N-terminus, includes or corresponds to the C-terminal 30%, 29%, 28%, 27%, 26%, 25%, 24%, 23%, 22%, 21%, 20%, 19%, 18%, 17%, 16%, 15%, 14%, 13%, 12%, 11%, 10%, 9%, 8%, 7%, 6%, 5%, 4%, 3%, 2%, or 1% of the amino acids of a Cas9 (e.g., the Cas9 of SEQ ID NO: 1). In some embodiments, the C-terminal fragment that is rearranged to the N-terminus, includes or corresponds to the C-terminal 410 residues or less of a Cas9 (e.g., the Cas9 of SEQ ID NO: 1). In some embodiments, the C-terminal portion that is rearranged to the N-terminus, includes or corresponds to the C-terminal 410, 400, 390, 380, 370, 360, 350, 340, 330, 320, 310, 300, 290, 280, 270, 260, 250, 240, 230, 220, 210, 200, 190, 180, 170, 160, 150, 140, 130, 120, 110, 100, 90, 80, 70, 60, 50, 40, 30, 20, or 10 residues of a Cas9 (e.g., the Cas9 of SEQ ID NO: 1). In some embodiments, the C-terminal portion that is rearranged to the N-terminus, includes or corresponds to the C-terminal 357, 341, 328, 120, or 69 residues of a Cas9 (e.g., the Cas9 of SEQ ID NO: 1).

[0315] In other embodiments, circular permutant Cas9 variants may be defined as a topological rearrangement of a Cas9 primary structure based on the following method, which is based on S. pyogenes Cas9 of SEQ ID NO: 1: (a) selecting a circular permutant (CP) site corresponding to an internal amino acid residue of the Cas9 primary structure, which dissects the original protein into two halves: an N-terminal region and a C-terminal region; (b) modifying the Cas9 protein sequence (e.g., by genetic engineering techniques) by moving the original C-terminal region (comprising the CP site amino acid) to preceed the original N-terminal region, thereby forming a new N-terminus of the Cas9 protein that now begins with the CP site amino acid residue. The CP site can be located in any domain of the Cas9 protein, including, for example, the helical-II domain, the RuvCIII domain, or the CTD domain. For example, the CP site may be located (relative the S. pyogenes Cas9 of SEQ ID NO: 1) at original amino acid residue 181, 199, 230, 270, 310, 1010, 1016, 1023, 1029, 1041, 1247, 1249, or 1282. Thus, once relocated to the N-terminus, original amino acid 181, 199, 230, 270, 310, 1010, 1016, 1023, 1029, 1041, 1247, 1249, or 1282 would become the new N-terminal amino acid. Nomenclature of these circular permutants may be referred to as “CP-Cas9” or “Cas9-CP” variants. For example, for Cas9-CP proteins having above CP sites at at original amino acid residue 181, 199, 230, 270, 310, 1010, 1016, 1023, 1029, 1041, 1247, 1249, or 1282, one may refer to these variants as Cas9-CP¹⁸¹, Cas9-CP¹⁹⁹, Cas9-CP²³⁰, Cas9-CP²⁷⁰, Cas9-CP³¹⁰, Cas9-CP¹⁰¹⁰, Cas9-CP¹⁰¹⁶, Cas9-CP¹⁰²³, Cas9-CP¹⁰²⁹, Cas9-CP¹⁰⁴¹, cas9-CP¹²⁴⁷, Cas9-CP¹²⁴⁹, and Cas9-CP¹²⁸², respectively. This description is not meant to be limited to making CP variants from SEQ ID NO: 1, but may be implemented to make CP variants in any Cas9 sequence, either at CP sites that correspond to these positions, or at other CP sites entirely. This description is not meant to limit the specific CP sites in any way. Virtually any CP site may be used to form a CP-Cas9 variant.

[0316] Exemplary CP-Cas9 amino acid sequences, based on the Cas9 of SEQ ID NO: 1, are provided below in which linker sequences are indicated by underlining and optional methionine (M) residues are indicated in bold. It should be appreciated that the disclosure provides CP-Cas9 sequences that do not include a linker sequence or that include different linker sequences. It should be appreciated that CP-Cas9 sequences may be based on Cas9 sequences other than that of SEQ ID NO: 1 and any examples provided herein are not meant to be limiting. Any suitable linker sequence (e.g., GGSGGSGGSGGSGGSGGSGG—SEQ ID NO: 314) may be used, including those disclosed herein.

Cas9-CP¹⁰¹²
(SEQ ID NO: 295)
DYKVYDVRKMIAKSEQEIGKATAKYFFYSNIMNFFKTEITLANGEIRKRPLIE
TNGETGEIVWDKGRDFATVRKVLSMPQVNIVKKTEVQTGGFSKESILPKRNSDKLIA
RKKDWDPKKYGGFDSPTVAYSVLVVAKVEKGKSKKLKSVKELLGITIMERSSFEKNPI
DFLEAKGYKEVKKDLIIKLPKYSLFELENGRKRMLASAGELQKGNELALPSKYVNFL
YLASHYEKLKGSPEDNEQKQLFVEQHKHYLDEIIEQISEFSKRVILADANLDKVLSAY
NKHRDKPIREQAENIIHLFTLTNLGAPAAFKYFDTTIDRKRYTSTKEVLDATLIHQSITG
LYETRIDLSQLGGDGGSGGSGGSGGSGGSGGSGGDKKYSIGLAIGTNSVGWAVITDE
YKVPSKKFKVLGNTDRHSIKKNLIGALLFDSGETAEATRLKRTARRRYTRRKNRICYL
QEIFSNEMAKVDDSFFHRLEESFLVEEDKKHERHPIFGNIVDEVAYHEKYPTIYHLRK
KLVDSTDKADLRLIYLALAHMIKFRGHFLIEGDLNPDNSDVDKLFIQLVQTYNQLFEE
NPINASGVDAKAILSARLSKSRRLENLIAQLPGEKKNGLFGNLIALSLGLTPNFKSNFD
LAEDAKLQLSKDTYDDDLDNLLAQIGDQYADLFLAAKNLSDAILLSDILRVNTEITKA
PLSASMIKRYDEHHQDLTLLKALVRQQLPEKYKEIFFDQSKNGYAGYIDGGASQEEFY
KFIKPILEKMDGTEELLVKLNREDLLRKQRTFDNGSIPHQIHLGELHAILRRQEDFYPF
LKDNREKIEKILTFRIPYYVGPLARGNSRFAWMTRKSEETITPWNFEEVVDKGASAQS
FIERMTNFDKNLPNEKVLPKHSLLYEYFTVYNELTKVKYVTEGMRKPAFLSGEQKKA
IVDLLFKTNRKVTVKQLKEDYFKKIECFDSVETSGVEDRFNASLGTYHDLLKIIKDKD
FLDNEENEDILEDIVLTLTLFEDREMIEERLKTYAHLFDDKVMKQLKRRRYTGWGRLS
RKLINGIRDKQSGKTILDFLKSDGFANRNFMQLIHDDSLTFKEDIQKAQVSGQGDSLH
EHIANLAGSPAIKKGILQTVKVVDELVKVMGRHKPENIVIEMARENQTTQKGQKNSR
ERMKRIEEGIKELGSQILKEHPVENTQLQNEKLYLYYLQNGRDMYVDQELDINRLSD
YDVDHIVPQSFLKDDSIDNKVLTRSDKNRGKSDNVPSEEVVKKMKNYWRQLLNAKL
ITQRKFDNLTKAERGGLSELDKAGFIKRQLVETRQITKHVAQILDSRMNTKYDENDKL
IREVKVITLKSKLVSDFRKDFQFYKVREINNYHHAHDAYLNAVVGTALIKKYPKLESE
FVYG.
Cas9-CP¹⁰²⁸
(SEQ ID NO: 296)
EIGKATAKYFFYSNIMNFFKTEITLANGEIRKRPLIETNGETGEIVWDKGRDFA
TVRKVLSMPQVNIVKKTEVQTGGFSKESILPKRNSDKLIARKKDWDPKKYGGFDSPT
VAYSVLVVAKVEKGKSKKLKSVKELLGITIMERSSFEKNPIDFLEAKGYKEVKKDLIIK
LPKYSLFELENGRKRMLASAGELQKGNELALPSKYVNFLYLASHYEKLKGSPEDNEQ
KQLFVEQHKHYLDEIIEQISEFSKRVILADANLDKVLSAYNKHRDKPIREQAENIIHLF
TLTNLGAPAAFKYFDTTIDRKRYTSTKEVLDATLIHQSITGLYETRIDLSQLGGDGGSG
GSGGSGGSGGSGGSGGMDKKYSIGLAIGTNSVGWAVITDEYKVPSKKFKVLGNTDR
HSIKKNLIGALLFDSGETAEATRLKRTARRRYTRRKNRICYLQEIFSNEMAKVDDSFFH
RLEESFLVEEDKKHERHPIFGNIVDEVAYHEKYPTIYHLRKKLVDSTDKADLRLIYLAL
AHMIKFRGHFLIEGDLNPDNSDVDKLFIQLVQTYNQLFEENPINASGVDAKAILSARL
SKSRRLENLIAQLPGEKKNGLFGNLIALSLGLTPNFKSNFLAEDAKLQLSKDTYDDD
LDNLLAQIGDQYADLFLAAKNLSDAILLSDILRVNTEITKAPLSASMIKRYDEHHQDLT
LLKALVRQQLPEKYKEIFFDQSKNGYAGYIDGGASQEEFYKFIKPILEKMDGTEELLV
KLNREDLLRKQRTFDNGSIPHQIHLGELHAILRRQEDFYPFLKDNREKIEKILTFRIPYY
VGPLARGNSRFAWMTRKSEETITPWNFEEVVDKGASAQSFIERMTNFDKNLPNEKVL
PKHSLLYEYFTVYNELTKVKYVTEGMRKPAFLSGEQKKAIVDLLFKTNRKVTVKQLK
EDYFKKIECFDSVETSGVEDRFNASLGTYHDLLKIIKDKDFLDNEENEDILEDIVLTLTL
FEDREMIEERLKTYAHLFDDKVMKQLKRRRYTGWGRLSRKLINGIRDKQSGKTILDF
LKSDGFANRNFMQLIHDDSLTFKEDIQKAQVSGQGDSLHEHIANLAGSPAIKKGILQT
VKVVDELVKVMGRHKPENIVIEMARENQTTQKGQKNSRERMKRIEEGIKELGSQILK
EHPVENTQLQNEKLYLYYLQNGRDMYVDQELDINRLSDYDVDHIVPQSFLKDDSIDN
KVLTRSDKNRGKSDNVPSEEVVKKMKNYWRQLLNAKLITQRKFDNLTKAERGGLSE
LDKAGFIKRQLVETRQITKHVAQILDSRMNTKYDENDKLIREVKVITLKSKLVSDFRK
DFQFYKVREINNYHHAHDAYLNAVVGTALIKKYPKLESEFVYGDYKVYDVRKMIAK
SEQ.
Cas9-CP¹⁰⁴¹
(SEQ ID NO: 297)
NIMNFFKTEITLANGEIRKRPLIETNGETGEIVWDKGRDFATVRKVLSMPQVN
IVKKTEVQTGGFSKESILPKRNSDKLIARKKDWDPKKYGGFDSPTVAYSVLVVAKVE
KGKSKKLKSVKELLGITIMERSSFEKNPIDFLEAKGYKEVKKDLIIKLPKYSLFELENG
RKRMLASAGELQKGNELALPSKYVNFLYLASHYEKLKGSPEDNEQKQLFVEQHKHY
LDEIIEQISEFSKRVILADANLDKVLSAYNKHRDKPIREQAENIIHLFTLTNLGAPAAFK
YFDTTIDRKRYTSTKEVLDATLIHQSITGLYETRIDLSQLGGDGGSGGSGGSGGSGGSG
GSGGDKKYSIGLAIGTNSVGWAVITDEYKVPSKKFKVLGNTDRHSIKKNLIGALLFDS
GETAEATRLKRTARRRYTRRKNRICYLQEIFSNEMAKVDDSFFHRLEESFLVEEDKKH
ERHPIFGNIVDEVAYHEKYPTIYHLRKKLVDSTDKADLRLIYLALAHMIKFRGHFLIEG
DLNPDNSDVDKLFIQLVQTYNQLFEENPINASGVDAKAILSARLSKSRRLENLIAQLP
GEKKNGLFGNLIALSLGLTPNFKSNFDLAEDAKLQLSKDTYDDDLDNLLAQIGDQYA
DLFLAAKNLSDAILLSDILRVNTEITKAPLSASMIKRYDEHHQDLTLLKALVRQQLPEK
YKEIFFDQSKNGYAGYIDGGASQEEFYKFIKPILEKMDGTEELLVKLNREDLLRKQRT
FDNGSIPHQIHLGELHAILRRQEDFYPFLKDNREKIEKILTFRIPYYVGPLARGNSRFAW
MTRKSEETITPWNFEEVVDKGASAQSFIERMTNFDKNLPNEKVLPKHSLLYEYFTVY
NELTKVKYVTEGMRKPAFLSGEQKKAIVDLLFKTNRKVTVKQLKEDYFKKIECFDSV
EISGVEDRFNASLGTYHDLLKIIKDKDFLDNEENEDILEDIVLTLTLFEDREMIEERLKT
YAHLFDDKVMKQLKRRRYTGWGRLSRKLINGIRDKQSGKTILDFLKSDGFANRNFM
QLIHDDSLTFKEDIQKAQVSGQGDSLHEHIANLAGSPAIKKGILQTVKVVDELVKVMG
RHKPENIVIEMARENQTTQKGQKNSRERMKRIEEGIKELGSQILKEHPVENTQLQNEK
LYLYYLQNGRDMYVDQELDINRLSDYDVDHIVPQSFLKDDSIDNKVLTRSDKNRGKS
DNVPSEEVVKKMKNYWRQLLNAKLITQRKFDNLTKAERGGLSELDKAGFIKRQLVE
TRQITKHVAQILDSRMNTKYDENDKLIREVKVITLKSKLVSDFRKDFQFYKVREINNY
HHAHDAYLNAVVGTALIKKYPKLESEFVYGDYKVYDVRKMIAKSEQEIGKATAKYFF
YS.
Cas9-CP¹²⁴⁹
(SEQ ID NO: 298)
PEDNEQKQLFVEQHKHYLDEIIEQISEFSKRVILADANLDKVLSAYNKHRDKP
IREQAENIIHLFTLTNLGAPAAFKYFDTTIDRKRYTSTKEVLDATLIHQSITGLYETRIDL
SQLGGDGGSGGSGGSGGSGGSGGSGGMDKKYSIGLAIGTNSVGWAVITDEYKVPSK
KFKVLGNTDRHSIKKNLIGALLFDSGETAEATRLKRTARRRYTRRKNRICYLQEIFSNE
MAKVDDSFFHRLEESFLVEEDKKHERHPIFGNIVDEVAYHEKYPTIYHLRKKLVDSTD
KADLRLIYLALAHMIKFRGHFLIEGDLNPDNSDVDKLFIQLVQTYNQLFEENPINASG
VDAKAILSARLSKSRRLENLIAQLPGEKKNGLFGNLIALSLGLTPNFKSNFDLAEDAK
LQLSKDTYDDDLDNLLAQIGDQYADLFLAAKNLSDAILLSDILRVNTEITKAPLSASM
IKRYDEHHQDLTLLKALVRQQLPEKYKEIFFDQSKNGYAGYIDGGASQEEFYKFIKPIL
EKMDGTEELLVKLNREDLLRKQRTFDNGSIPHQIHLGELHAILRRQEDFYPFLKDNRE
KIEKILTFRIPYYVGPLARGNSRFAWMTRKSEETITPWNFEEVVDKGASAQSFIERMT
NFDKNLPNEKVLPKHSLLYEYFTVYNELTKVKYVTEGMRKPAFLSGEQKKAIVDLLF
KTNRKVTVKQLKEDYFKKIECFDSVEISGVEDRFNASLGTYHDLLKIIKDKDFLDNEE
NEDILEDIVLTLTLFEDREMIEERLKTYAHLFDDKVMKQLKRRRYTGWGRLSRKLING
IRDKQSGKTILDFLKSDGFANRNFMQLIHDDSLTFKEDIQKAQVSGQGDSLHEHIANL
AGSPAIKKGILQTVKVVDELVKVMGRHKPENIVIEMARENQTTQKGQKNSRERMKRI
EEGIKELGSQILKEHPVENTQLQNEKLYLYYLQNGRDMYVDQELDINRLSDYDVDHI
VPQSFLKDDSIDNKVLTRSDKNRGKSDNVPSEEVVKKMKNYWRQLLNAKLITQRKF
DNLTKAERGGLSELDKAGFIKRQLVETRQITKHVAQILDSRMNTKYDENDKLIREVK
VITLKSKLVSDFRKDFQFYKVREINNYHHAHDAYLNAVVGTALIKKYPKLESEFVYG
DYKVYDVRKMIAKSEQEIGKATAKYFFYSNIMNFFKTEITLANGEIRKRPLIETNGET
GEIVWDKGRDFATVRKVLSMPQVNIVKKTEVQTGGFSKESILPKRNSDKLIARKKDW
DPKKYGGFDSPTVAYSVLVVAKVEKGKSKKLKSVKELLGITIMERSSFEKNPIDFLEA
KGYKEVKKDLIIKLPKYSLFELENGRKRMLASAGELQKGNELALPSKYVNFLYLASH
YEKLKGS.
Cas9-CP¹³⁰⁰
(SEQ ID NO: 299)
KPIREQAENIIHLFTLTNLGAPAAFKYFDTTIDRKRYTSTKEVLDATLIHQSITG
LYETRIDLSQLGGDGGSGGSGGSGGSGGSGGSGGDKKYSIGLAIGTNSVGWAVITDE
YKVPSKKFKVLGNTDRHSIKKNLIGALLFDSGETAEATRLKRTARRRYTRRKNRICYL
QEIFSNEMAKVDDSFFHRLEESFLVEEDKKHERHPIFGNIVDEVAYHEKYPTIYHLRK
KLVDSTDKADLRLIYLALAHMIKFRGHFLIEGDLNPDNSDVDKLFIQLVQTYNQLFEE
NPINASGVDAKAILSARLSKSRRLENLIAQLPGEKKNGLFGNLIALSLGLTPNFKSNFD
LAEDAKLQLSKDTYDDDLDNLLAQIGDQYADLFLAAKNLSDAILLSDILRVNTEITKA
PLSASMIKRYDEHHQDLTLLKALVRQQLPEKYKEIFFDQSKNGYAGYIDGGASQEEFY
KFIKPILEKMDGTEELLVKLNREDLLRKQRTFDNGSIPHQIHLGELHAILRRQEDFYPF
LKDNREKIEKILTFRIPYYVGPLARGNSRFAWMTRKSEETITPWNFEEVVDKGASAQS
FIERMTNFDKNLPNEKVLPKHSLLYEYFTVYNELTKVKYVTEGMRKPAFLSGEQKKA
IVDLLFKTNRKVTVKQLKEDYFKKIECFDSVETSGVEDRFNASLGTYHDLLKIIKDKD
FLDNEENEDILEDIVLTLTLFEDREMIEERLKTYAHLFDDKVMKQLKRRRYTGWGRLS
RKLINGIRDKQSGKTILDFLKSDGFANRNFMQLIHDDSLTFKEDIQKAQVSGQGDSLH
EHIANLAGSPAIKKGILQTVKVVDELVKVMGRHKPENIVIEMARENQTTQKGQKNSR
ERMKRIEEGIKELGSQILKEHPVENTQLQNEKLYLYYLQNGRDMYVDQELDINRLSD
YDVDHIVPQSFLKDDSIDNKVLTRSDKNRGKSDNVPSEEVVKKMKNYWRQLLNAKL
ITQRKFDNLTKAERGGLSELDKAGFIKRQLVETRQITKHVAQILDSRMNTKYDENDKL
IREVKVITLKSKLVSDFRKDFQFYKVREINNYHHAHDAYLNAVVGTALIKKYPKLESE
FVYGDYKVYDVRKMIAKSEQEIGKATAKYFFYSNIMNFFKTEITLANGEIRKRPLIET
NGETGEIVWDKGRDFATVRKVLSMPQVNIVKKTEVQTGGFSKESILPKRNSDKLIAR
KKDWDPKKYGGFDSPTVAYSVLVVAKVEKGKSKKLKSVKELLGITIMERSSFEKNPI
DFLEAKGYKEVKKDLIIKLPKYSLFELENGRKRMLASAGELQKGNELALPSKYVNFL
YLASHYEKLKGSPEDNEQKQLFVEQHKHYLDEIIEQISEFSKRVILADANLDKVLSAY
NKHRD.

[0317] Exemplary C-terminal fragments of Cas9, based on the Cas9 of SEQ ID NO: 1, which may be rearranged as a new N-terminus of Cas9, are provided below. It should be appreciated that such C-terminal fragments of Cas9 are exemplary and are not meant to be limiting.

CP¹⁰¹² (i.e., the new C-terminus portion of Cas9-
CP¹⁰¹²)
(SEQ ID NO: 300)
DYKVYDVRKMIAKSEQEIGKATAKYFFYSNIMNFFKTEITLANGEIRKRPL
IETNGETGEIVWDKGRDFATVRKVLSMPQVNIVKKTEVQTGGFSKESILPK
RNSDKLIARKKDWDPKKYGGFDSPTVAYSVLVVAKVEKGKSKKLKSVKELL
GITIMERSSFEKNPIDFLEAKGYKEVKKDLIIKLPKYSLFELENGRKRMLA
SAGELQKGNELALPSKYVNFLYLASHYEKLKGSPEDNEQKQLFVEQHKHYL
DEIIEQISEFSKRVILADANLDKVLSAYNKHRDKPIREQAENIIHLFTLTN
LGAPAAFKYFDTTIDRKRYTSTKEVLDATLIHQSITGLYETRIDLSQLGG
D.
CP¹⁰²⁸ (i.e., the new C-terminus portion of Cas9-
CP¹⁰²⁸)
(SEQ ID NO: 301)
EIGKATAKYFFYSNIMNFFKTEITLANGEIRKRPLIETNGETGEIVWDKGR
DFATVRKVLSMPQVNIVKKTEVQTGGFSKESILPKRNSDKLIARKKDWDPK
KYGGFDSPTVAYSVLVVAKVEKGKSKKLKSVKELLGITIMERSSFEKNPID
FLEAKGYKEVKKDLIIKLPKYSLFELENGRKRMLASAGELQKGNELALPSK
YVNFLYLASHYEKLKGSPEDNEQKQLFVEQHKHYLDEIIEQISEFSKRVIL
ADANLDKVLSAYNKHRDKPIREQAENIIHLFTLTNLGAPAAFKYFDTTIDR
KRYTSTKEVLDATLIHQSITGLYETRIDLSQLGGD.
CP¹⁰⁴¹ (i.e., the new C-terminus portion of Cas9-
CP¹⁰⁴¹)
(SEQ ID NO: 302)
NIMNFFKTEITLANGEIRKRPLIETNGETGEIVWDKGRDFATVRKVLSMPQ
VNIVKKTEVQTGGFSKESILPKRNSDKLIARKKDWDPKKYGGFDSPTVAYS
VLVVAKVEKGKSKKLKSVKELLGITIMERSSFEKNPIDFLEAKGYKEVKKD
LIIKLPKYSLFELENGRKRMLASAGELQKGNELALPSKYVNFLYLASHYEK
LKGSPEDNEQKQLFVEQHKHYLDEIIEQISEFSKRVILADANLDKVLSAYN
KHRDKPIREQAENIIHLFTLTNLGAPAAFKYFDTTIDRKRYTSTKEVLDAT
LIHQSITGLYETRIDLSQLGGD.
CP¹²⁴⁹ (i.e., the new C-terminus portion of Cas9-
CP¹²⁴⁹)
(SEQ ID NO: 303)
PEDNEQKQLFVEQHKHYLDEIIEQISEFSKRVILADANLDKVLSAYNKHRD
KPIREQAENIIHLFTLTNLGAPAAFKYFDTTIDRKRYTSTKEVLDATLIHQ
SITGLYETRIDLSQLGGD.
CP¹³⁰⁰ (i.e., the new C-terminus portion of Cas9-
CP¹³⁰⁰
(SEQ ID NO: 304)
KPIREQAENIIHLFTLTNLGAPAAFKYFDTTIDRKRYTSTKEVLDATLIHQ
SITGLYETRIDLSQLGGD.

Cas9 with Non-Canonical PAM Specificities

[0318] In some embodiments, the nucleic acid programmable DNA binding protein (napDNAbp) is a nucleic acid programmable DNA binding protein that does not require a canonical (NGG) PAM sequence. In some embodiments, the napDNAbp is an argonaute protein. One example of such a nucleic acid programmable DNA binding protein is an Argonaute protein from Natronobacterium gregoryi (NgAgo). NgAgo is a ssDNA-guided endonuclease. NgAgo binds 5′ phosphorylated ssDNA of ˜24 nucleotides (gDNA) to guide it to its target site and will make DNA double-strand breaks at the gDNA site. In contrast to Cas9, the NgAgo-gDNA system does not require a protospacer-adjacent motif (PAM). Using a nuclease inactive NgAgo (dNgAgo) can greatly expand the bases that may be targeted. The characterization and use of NgAgo have been described in Gao et al., Nat Biotechnol., 2016 July; 34(7):768-73. PubMed PMID: 27136078; Swarts et al., Nature. 507(7491) (2014):258-61; and Swarts et al., Nucleic Acids Res. 43(10) (2015):5120-9, each of which is incorporated herein by reference. The sequence of Natronobacterium gregoryi Argonaute is provided in SEQ ID NO: 5.

Wild type Natronobacterium gregoryi Argonaute (SEQ
ID NO: 5)
(SEQ ID NO: 5)
MTVIDLDSTTTADELTSGHTYDISVTLTGVYDNTDEQHPRMSLAFEQDNGE
RRYITLWKNTTPKDVFTYDYATGSTYIFTNIDYEVKDGYENLTATYQTTVE
NATAQEVGTTDEDETFAGGEPLDHHLDDALNETPDDAETESDSGHVMTSFA
SRDQLPEWTLHTYTLTATDGAKTDTEYARRTLAYTVRQELYTDHDAAPVAT
DGLMLLTPEPLGETPLDLDCGVRVEADETRTLDYTTAKDRLLARELVEEGL
KRSLWDDYLVRGIDEVLSKEPVLTCDEFDLHERYDLSVEVGHSGRAYLHIN
FRHRFVPKLTLADIDDDNIYPGLRVKTTYRPRRGHIVWGLRDECATDSLNT
LGNQSVVAYHRNNQTPINTDLLDAIEAADRRVVETRRQGHGDDAVSFPQEL
LAVEPNTHQIKQFASDGFHQQARSKTRLSASRCSEKAQAFAERLDPVRLNG
STVEFSSEFFTGNNEQQLRLLYENGESVLTFRDGARGAHPDETFSKGIVNP
PESFEVAVVLPEQQADTCKAQWDTMADLLNQAGAPPTRSETVQYDAFSSPE
SISLNVAGAIDPSEVDAAFVVLPPDQEGFADLASPTETYDELKKALANMGI
YSQMAYFDRFRDAKIFYTRNVALGLLAAAGGVAFTTEHAMPGDADMFIGID
VSRSYPEDGASGQINIAATATAVYKDGTILGHSSTRPQLGEKLQSTDVRDI
MKNAILGYQQVTGESPTHIVIHRDGFMNEDLDPATEFLNEQGVEYDIVEIR
KQPQTRLLAVSDVQYDTPVKSIAAINQNEPRATVATFGAPEYLATRDGGGL
PRPIQIERVAGETDIETLTRQVYLLSQSHIQVHNSTARLPITTAYADQAST
HATKGYLVQTGAFESNVGFL.

[0319] In some embodiments, the napDNAbp is a prokaryotic homolog of an Argonaute protein. Prokaryotic homologs of Argonaute proteins are known and have been described, for example, in Makarova K., et al., “Prokaryotic homologs of Argonaute proteins are predicted to function as key components of a novel system of defense against mobile genetic elements”, Biol Direct. 2009 Aug. 25; 4:29. doi: 10.1186/1745-6150-4-29, the entire contents of which is hereby incorporated by reference. In some embodiments, the napDNAbp is a Marinitoga piezophila Argunaute (MpAgo) protein. The CRISPR-associated Marinitoga piezophila Argunaute (MpAgo) protein cleaves single-stranded target sequences using 5′-phosphorylated guides. The 5′ guides are used by all known Argonautes. The crystal structure of an MpAgo-RNA complex shows a guide strand binding site comprising residues that block 5′ phosphate interactions. This data suggests the evolution of an Argonaute subclass with noncanonical specificity for a 5′-hydroxylated guide. See, e.g., Kaya et al., “A bacterial Argonaute with noncanonical guide RNA specificity”, Proc Natl Acad Sci USA. 2016 Apr. 12; 113(15):4057-62, the entire contents of which are hereby incorporated by reference). It should be appreciated that other argonaute proteins may be used, and are within the scope of this disclosure.

[0320] In some embodiments, the nucleic acid programmable DNA binding protein (napDNAbp) is a single effector of a microbial CRISPR-Cas system. Single effectors of microbial CRISPR-Cas systems include, without limitation, Cas9, Cpf1, C2c1, C2c2, and C2c3. Typically, microbial CRISPR-Cas systems are divided into Class 1 and Class 2 systems. Class 1 systems have multisubunit effector complexes, while Class 2 systems have a single protein effector. For example, Cas9 and Cpf1 are Class 2 effectors. In addition to Cas9 and Cpf1, three distinct Class 2 CRISPR-Cas systems (C2c1, C2c2, and C2c3) have been described by Shmakov et al., “Discovery and Functional Characterization of Diverse Class 2 CRISPR Cas Systems”, Mol. Cell, 2015 Nov. 5; 60(3): 385-397, the entire contents of which is hereby incorporated by reference. Effectors of two of the systems, C2c1 and C2c3, contain RuvC-like endonuclease domains related to Cpf1. A third system, C2c2 contains an effector with two predicated HEPN RNase domains. Production of mature CRISPR RNA is tracrRNA-independent, unlike production of CRISPR RNA by C2c1. C2c1 depends on both CRISPR RNA and tracrRNA for DNA cleavage. Bacterial C2c2 has been shown to possess a unique RNase activity for CRISPR RNA maturation distinct from its RNA-activated single-stranded RNA degradation activity. These RNase functions are different from each other and from the CRISPR RNA-processing behavior of Cpf1. See, e.g., East-Seletsky, et al., “Two distinct RNase activities of CRISPR-C2c2 enable guide-RNA processing and RNA detection”, Nature, 2016 Oct. 13; 538(7624):270-273, the entire contents of which are hereby incorporated by reference. In vitro biochemical analysis of C2c2 in Leptotrichia shahii has shown that C2c2 is guided by a single CRISPR RNA and can be programed to cleave ssRNA targets carrying complementary protospacers. Catalytic residues in the two conserved HEPN domains mediate cleavage. Mutations in the catalytic residues generate catalytically inactive RNA-binding proteins. See e.g., Abudayyeh et al., “C2c2 is a single-component programmable RNA-guided RNA-targeting CRISPR effector”, Science, 2016 Aug. 5; 353(6299), the entire contents of which are hereby incorporated by reference.

[0321] The crystal structure of Alicyclobaccillus acidoterrastris C2c1 (AacC2c1) has been reported in complex with a chimeric single-molecule guide RNA (sgRNA). See e.g., Liu et al., “C2c1-sgRNA Complex Structure Reveals RNA-Guided DNA Cleavage Mechanism”, Mol. Cell, 2017 Jan. 19; 65(2):310-322, the entire contents of which are hereby incorporated by reference. The crystal structure has also been reported in Alicyclobacillus acidoterrestris C2c1 bound to target DNAs as ternary complexes. See e.g., Yang et al., “PAM-dependent Target DNA Recognition and Cleavage by C2C1 CRISPR-Cas endonuclease”, Cell, 2016 Dec. 15; 167(7):1814-1828, the entire contents of which are hereby incorporated by reference. Catalytically competent conformations of AacC2c1, both with target and non-target DNA strands, have been captured independently positioned within a single RuvC catalytic pocket, with C2c1-mediated cleavage resulting in a staggered seven-nucleotide break of target DNA. Structural comparisons between C2c1 ternary complexes and previously identified Cas9 and Cpf1 counterparts demonstrate the diversity of mechanisms used by CRISPR-Cas9 systems.

[0322] In some embodiments, the nucleic acid programmable DNA binding protein (napDNAbp) of any of the fusion proteins provided herein may be a C2c1, a C2c2, or a C2c3 protein. In some embodiments, the napDNAbp is a C2c1 protein. In some embodiments, the napDNAbp is a C2c2 protein. In some embodiments, the napDNAbp is a C2c3 protein. In some embodiments, the napDNAbp comprises an amino acid sequence that is at least 85%, at least 90%, at least 91%, at least 92%, at least 93%, at least 94%, at least 95%, at least 96%, at least 97%, at least 98%, at least 99%, or at least 99.5% identical to a naturally-occurring C2c1, C2c2, or C2c3 protein. In some embodiments, the napDNAbp is a naturally-occurring C2c1, C2c2, or C2c3 protein. In some embodiments, the napDNAbp comprises an amino acid sequence that is at least 85%, at least 90%, at least 91%, at least 92%, at least 93%, at least 94%, at least 95%, at least 96%, at least 97%, at least 98%, at least 99%, or at least 99.5% identical to any one of SEQ ID NOs: 43 or 44. In some embodiments, the napDNAbp comprises an amino acid sequence of any one SEQ ID NOs: 43 or 44.

[0323] It should be appreciated that C2c1, C2c2, or C2c3 from other bacterial species may also be used in accordance with the present disclosure. In some embodiments, the napDNAbp comprises an amino acid sequence that is at least 85%, at least 90%, at least 91%, at least 92%, at least 93%, at least 94%, at least 95%, at least 96%, at least 97%, at least 98%, at least 99%, or at least 99.5% identical to any one of the sequences of C2c1, C2c2, or C2c3.

C2c1 (uniprot.org/uniprot/T0D7A2#)
sp|T0D7A2|C2C1_ALIAG CRISPR-associated endonuclease
C2c1 OS = Alicyclobacillus acidoterrestris (strain
ATCC 49025 / DSM 3922 / CIP 106132 / NCIMB 13137 /
GD3B) GN = c2c1 PE = 1 SV = 1
(SEQ ID NO: 6)
MAVKSIKVKLRLDDMPEIRAGLWKLHKEVNAGVRYYTEWLSLLRQENLYRR
SPNGDGEQECDKTAEECKAELLERLRARQVENGHRGPAGSDDELLQLARQL
YELLVPQAIGAKGDAQQIARKFLSPLADKDAVGGLGIAKAGNKPRWVRMRE
AGEPGWEEEKEKAETRKSADRTADVLRALADFGLKPLMRVYTDSEMSSVEW
KPLRKGQAVRTWDRDMFQQAIERMMSWESWNQRVGQEYAKLVEQKNRFEQK
NFVGQEHLVHLVNQLQQDMKEASPGLESKEQTAHYVTGRALRGSDKVFEKW
GKLAPDAPFDLYDAEIKNVQRRNTRRFGSHDLFAKLAEPEYQALWREDASF
LTRYAVYNSILRKLNHAKMFATFTLPDATAHPIWTRFDKLGGNLHQYTFLF
NEFGERRHAIRFHKLLKVENGVAREVDDVTVPISMSEQLDNLLPRDPNEPI
ALYFRDYGAEQHFTGEFGGAKIQCRRDQLAHMHRRRGARDVYLNVSVRVQS
QSEARGERRPPYAAVFRLVGDNHRAFVHFDKLSDYLAEHPDDGKLGSEGLL
SGLRVMSVDLGLRTSASISVFRVARKDELKPNSKGRVPFFFPIKGNDNLVA
VHERSQLLKLPGETESKDLRAIREERQRTLRQLRTQLAYLRLLVRCGSEDV
GRRERSWAKLIEQPVDAANHMTPDWREAFENELQKLKSLHGICSDKEWMDA
VYESVRRVWRHMGKQVRDWRKDVRSGERPKIRGYAKDVVGGNSIEQIEYLE
RQYKFLKSWSFFGKVSGQVIRAEKGSRFAITLREHIDHAKEDRLKKLADRI
IMEALGYVYALDERGKGKWVAKYPPCQLILLEELSEYQFNNDRPPSENNQL
MQWSHRGVFQELINQAQVHDLLVGTMYAAFSSRFDARTGAPGIRCRRVPAR
CTQEHNPEPFPWWLNKFVVEHTLDACPLRADDLIPTGEGEIFVSPFSAEEG
DFHQIHADLNAAQNLQQRLWSDFDISQIRLRCDWGEVDGELVLIPRLTGKR
TADSYSNKVFYTNTGVTYYERERGKKRRKVFAQEKLSEEEAELLVEADEAR
EKSVVLMRDPSGIINRGNWTRQKEFWSMVNQRIEGYLVKQIRSRVPLQDSA
CENTGDI
C2c2 (uniprot.org/uniprot/P0DOC6)
>sp|P0DOC6|C2C2_LEPSD CRISPR-associated endoribo-
nuclease C2c2 OS = Leptotrichia shahii (strain DSM
19757 / CCUG 47503 / CIP 107916 / JCM 16776 / LB37)
GN = c2c2 PE = 1 SV = 1
(SEQ ID NO: 7)
MGNLFGHKRWYEVRDKKDFKIKRKVKVKRNYDGNKYILNINENNNKEKIDN
NKFIRKYINYKKNDNILKEFTRKFHAGNILFKLKGKEGIIRIENNDDFLET
EEVVLYIEAYGKSEKLKALGITKKKIIDEAIRQGITKDDKKIEIKRQENEE
EIEIDIRDEYTNKTLNDCSIILRIIENDELETKKSIYEIFKNINMSLYKII
EKIIENETEKVFENRYYEEHLREKLLKDDKIDVILTNFMEIREKIKSNLEI
LGFVKFYLNVGGDKKKSKNKKMLVEKILNINVDLTVEDIADFVIKELEFWN
ITKRIEKVKKVNNEFLEKRRNRTYIKSYVLLDKHEKFKIERENKKDKIVKF
FVENIKNNSIKEKIEKILAEFKIDELIKKLEKELKKGNCDTEIFGIFKKHY
KVNFDSKKFSKKSDEEKELYKIIYRYLKGRIEKILVNEQKVRLKKMEKIEI
EKILNESILSEKILKRVKQYTLEHIMYLGKLRHNDIDMTTVNTDDFSRLHA
KEELDLELITFFASTNMELNKIFSRENINNDENIDFFGGDREKNYVLDKKI
LNSKIKIIRDLDFIDNKNNITNNFIRKFTKIGTNERNRILHAISKERDLQG
TQDDYNKVINIIQNLKISDEEVSKALNLDVVFKDKKNIITKINDIKISEEN
NNDIKYLPSFSKVLPEILNLYRNNPKNEPFDTIETEKIVLNALIYVNKELY
KKLILEDDLEENESKNIFLQELKKTLGNIDEIDENIIENYYKNAQISASKG
NNKAIKKYQKKVIECYIGYLRKNYEELFDFSDFKMNIQEIKKQIKDINDNK
TYERITVKTSDKTIVINDDFEYIISIFALLNSNAVINKIRNRFFATSVWLN
TSEYQNIIDILDEIMQLNTLRNECITENWNLNLEEFIQKMKEIEKDFDDFK
IQTKKEIFNNYYEDIKNNILTEFKDDINGCDVLEKKLEKIVIFDDETKFEI
DKKSNILQDEQRKLSNINKKDLKKKVDQYIKDKDQEIKSKILCRIIFNSDF
LKKYKKEIDNLIEDMESENENKFQEIYYPKERKNELYIYKKNLFLNIGNPN
FDKIYGLISNDIKMADAKFLFNIDGKNIRKNKISEIDAILKNLNDKLNGYS
KEYKEKYIKKLKENDDFFAKNIQNKNYKSFEKDYNRVSEYKKIRDLVEFNY
LNKIESYLIDINWKLAIQMARFERDMHYIVNGLRELGIIKLSGYNTGISRA
YPKRNGSDGFYTTTAYYKFFDEESYKKFEKICYGFGIDLSENSEINKPENE
SIRNYISHFYIVRNPFADYSIAEQIDRVSNLLSYSTRYNNSTYASVFEVFK
KDVNLDYDELKKKFKLIGNNDILERLMKPKKVSVLELESYNSDYIKNLIIE
LLTKIENTNDTL

[0324] Some aspects of the disclosure provide Cas9 domains that have different PAM specificities. Typically, Cas9 proteins, such as Cas9 from S. pyogenes (spCas9), require a canonical NGG PAM sequence to bind a particular nucleic acid region. This may limit the ability to edit desired bases within a genome. In some embodiments, the base editing fusion proteins provided herein may need to be placed at a precise location, for example where a target base is placed within a 4 base region (e.g., a “deamination window”), which is approximately 15 bases upstream of the PAM. See Komor, A. C., et al., “Programmable editing of a target base in genomic DNA without double-stranded DNA cleavage” Nature 533, 420-424 (2016), the entire contents of which are hereby incorporated by reference. Accordingly, in some embodiments, any of the fusion proteins provided herein may contain a Cas9 domain that is capable of binding a nucleotide sequence that does not contain a canonical (e.g., NGG) PAM sequence. Cas9 domains that bind to non-canonical PAM sequences have been described in the art and would be apparent to the skilled artisan. For example, Cas9 domains that bind non-canonical PAM sequences have been described in Kleinstiver, B. P., et al., “Engineered CRISPR-Cas9 nucleases with altered PAM specificities” Nature 523, 481-485 (2015); and Kleinstiver, B. P., et al., “Broadening the targeting range of Staphylococcus aureus CRISPR-Cas9 by modifying PAM recognition” Nature Biotechnology 33, 1293-1298 (2015); the entire contents of each are hereby incorporated by reference.

[0325] In some embodiments, the Cas9 domain of any of the fusion proteins provided herein comprises an amino acid sequence that is at least 60%, at least 65%, at least 70%, at least 75%, at least 80%, at least 85%, at least 90%, at least 95%, at least 96%, at least 97%, at least 98%, at least 99%, or at least 99.5% identical to SEQ ID NO: 45. In some embodiments, the Cas9 domain of any of the fusion proteins provided herein comprises the amino acid sequence of SEQ ID NOs: 45 In some embodiments, the Cas9 domain of any of the fusion proteins provided herein consists of the amino acid sequence of SEQ ID NO: 45.

[0326] An exemplary SaCas9 amino acid sequence is:

(SEQ ID NO: 8)
KRNYILGLDIGITSVGYGIIDYETRDVIDAGVRLFKEANVENNEGRRSKRG
ARRLKRRRRHRIQRVKKLLFDYNLLTDHSELSGINPYEARVKGLSQKLSEE
EFSAALLHLAKRRGVHNVNEVEEDTGNELSTKEQISRNSKALEEKYVAELQ
LERLKKDGEVRGSINRFKTSDYVKEAKQLLKVQKAYHQLDQSFIDTYIDLL
ETRRTYYEGPGEGSPFGWKDIKEWYEMLMGHCTYFPEELRSVKYAYNADLY
NALNDLNNLVITRDENEKLEYYEKFQIIENVFKQKKKPTLKQIAKEILVNE
EDIKGYRVTSTGKPEFTNLKVYHDIKDITARKEIIENAELLDQIAKILTIY
QSSEDIQEELTNLNSELTQEEIEQISNLKGYTGTHNLSLKAINLILDELWH
TNDNQIAIFNRLKLVPKKVDLSQQKEIPTTLVDDFILSPVVKRSFIQSIKV
INAIIKKYGLPNDIIIELAREKNSKDAQKMINEMQKRNRQTNERIEEIIRT
TGKENAKYLIEKIKLHDMQEGKCLYSLEAIPLEDLLNNPFNYEVDHIIPRS
VSFDNSFNNKVLVKQEENSKKGNRTPFQYLSSSDSKISYETFKKHILNLAK
GKGRISKTKKEYLLEERDINRFSVQKDFINRNLVDTRYATRGLMNLLRSYF
RVNNLDVKVKSINGGFTSFLRRKWKFKKERNKGYKHHAEDALIIANADFIF
KEWKKLDKAKKVMENQMFEEKQAESMPEIETEQEYKEIFITPHQIKHIKDF
KDYKYSHRVDKKPNRELINDTLYSTRKDDKGNTLIVNNLNGLYDKDNDKLK
KLINKSPEKLLMYHHDPQTYQKLKLIMEQYGDEKNPLYKYYEETGNYLTKY
SKKDNGPVIKKIKYYGNKLNAHLDITDDYPNSRNKVVKLSLKPYRFDVYLD
NGVYKFVTVKNLDVIKKENYYEVNSKCYEEAKKLKKISNQAEFIASFYNND
LIKINGELYRVIGVNNDLLNRIEVNMIDITYREYLENMNDKRPPRIIKTIA
SKTQSIKKYSTDILGNLYEVKSKKHPQIIKKG.

Other napDNAbps

[0327] In addition to the circularly permutant Cas9 variants and Cas9 variants with modified PAM specifities described above, the improved ABEs and CBEs disclosed herein may also include other suitable napDNAbp described below. These napDNAbps range from wildtype napDNAbp, orthologs thereof, and naturally occurring and engineered variants of Cas9, all of which can be further modified (e.g., by use of evolution-based mutagenesis, e.g., PACE or PANCE) as circular permutants and/or Cas9 variants that introduce modified PAM specificities, which can be used with the improved ABEs and CBEs of the present disclosure.

[0328] In various embodiments, the variant Cas9s for use in the ABEs and CBEs disclosed herein can be derived from a Streptococcus pyogenes Cas9 (“SpCas9”), or a derivative thereof that has been modified as a circular permutant or otherwise a variant having non-canonical PAM binding specificity. This Cas9 protein is a large, multi-domain protein containing two distinct nuclease domains. Point mutations can be introduced into Cas9 to abolish nuclease activity, resulting in a dead Cas9 (dCas9) that still retains its ability to bind DNA in a sgRNA-programmed manner. In principle, when fused to another protein or domain, dCas9 can target that protein to virtually any DNA sequence simply by co-expression with an appropriate sgRNA.

[0329] As outlined above, Cas9 and equivalents recognizes a short motif in the CRISPR repeat sequences (the PAM or protospacer adjacent motif) to help distinguish self versus non-self. As noted herein, Cas9 nuclease sequences and structures are well known to those of skill in the art (see, e.g., “Complete genome sequence of an M1 strain of Streptococcus pyogenes.” Ferretti et al., J. J., McShan W. M., Ajdic D. J., Savic D. J., Savic G., Lyon K., Primeaux C., Sezate S., Suvorov A. N., Kenton S., Lai H. S., Lin S. P., Qian Y., Jia H. G., Najar F. Z., Ren Q., Zhu H., Song L., White J., Yuan X., Clifton S. W., Roe B. A., McLaughlin R. E., Proc. Natl. Acad. Sci. U.S.A. 98:4658-4663(2001); “CRISPR RNA maturation by trans-encoded small RNA and host factor RNase III.” Deltcheva E., Chylinski K., Sharma C. M., Gonzales K., Chao Y., Pirzada Z. A., Eckert M. R., Vogel J., Charpentier E., Nature 471:602-607(2011); and “A programmable dual-RNA-guided DNA endonuclease in adaptive bacterial immunity.” Jinek M., Chylinski K., Fonfara I., Hauer M., Doudna J. A., Charpentier E. Science 337:816-821(2012), the entire contents of each of which are incorporated herein by reference).

[0330] CRISPR is an adaptive immune system that provides protection against mobile genetic elements (viruses, transposable elements and conjugative plasmids). CRISPR clusters contain spacers, sequences complementary to antecedent mobile elements, and target invading nucleic acids. CRISPR clusters are transcribed and processed into CRISPR RNA (crRNA). In type II CRISPR systems correct processing of pre-crRNA requires a trans-encoded small RNA (tracrRNA), endogenous ribonuclease 3 (mc) and a Cas9 protein. The tracrRNA serves as a guide for ribonuclease 3-aided processing of pre-crRNA. Subsequently, Cas9/crRNA/tracrRNA endonucleolytically cleaves linear or circular dsDNA target complementary to the spacer. The target strand not complementary to crRNA is first cut endonucleolytically, then trimmed 3′-5′ exonucleolytically. In nature, DNA-binding and cleavage typically requires protein and both RNAs. However, single guide RNAs (“sgRNA”, or simply “gNRA”) can be engineered so as to incorporate aspects of both the crRNA and tracrRNA into a single RNA species. See, e.g., Jinek M., Chylinski K., Fonfara I., Hauer M., Doudna J. A., Charpentier E. Science 337:816-821(2012), the entire contents of which is hereby incorporated by reference.

[0331] In certain embodiments, the ABE and/or CBEs can comprise a S. pyogenes Cas9 (SpCas9) or derivative thereof. SpCas9 is 1368 amino acids in length and has the following amino acid sequence (in the N-terminus to C-terminus direction):

UniProtKB - Q99ZW2 (CAS9_STRP1):
[SEQ ID NO: 1]
MDKKYSIGLD IGTNSVGWAV ITDEYKVPSK KFKVLGNTDR
HSIKKNLIGA LLFDSGETAE ATRLKRTARR RYTRRKNRIC
YLQEIFSNEM AKVDDSFFHR LEESFLVEED KKHERHPIFG
NIVDEVAYHE KYPTIYHLRK KLVDSTDKAD LRLIYLALAH
MIKFRGHFLI EGDLNPDNSD VDKLFIQLVQ TYNQLFEENP
INASGVDAKA ILSARLSKSR RLENLIAQLP GEKKNGLFGN
LIALSLGLTP NFKSNFDLAE DAKLQLSKDT YDDDLDNLLA
QIGDQYADLF LAAKNLSDAI LLSDILRVNT EITKAPLSAS
MIKRYDEHHQ DLTLLKALVR QQLPEKYKEI FFDQSKNGYA
GYIDGGASQE EFYKFIKPIL EKMDGTEELL VKLNREDLLR
KQRTFDNGSI PHQIHLGELH AILRRQEDFY PFLKDNREKI
EKILTFRIPY YVGPLARGNS RFAWMTRKSE ETITPWNFEE
VVDKGASAQS FIERMTNFDK NLPNEKVLPK HSLLYEYFTV
YNELTKVKYV TEGMRKPAFL SGEQKKAIVD LLFKTNRKVT
VKQLKEDYFK KIECFDSVEI SGVEDRFNAS LGTYHDLLKI
IKDKDFLDNE ENEDILEDIV LTLTLFEDRE MIEERLKTYA
HLFDDKVMKQ LKRRRYTGWG RLSRKLINGI RDKQSGKTIL
DFLKSDGFAN RNFMQLIHDD SLTFKEDIQK AQVSGQGDSL
HEHIANLAGS PAIKKGILQT VKVVDELVKV MGRHKPENIV
IEMARENQTT QKGQKNSRER MKRIEEGIKE LGSQILKEHP
VENTQLQNEK LYLYYLQNGR DMYVDQELDI NRLSDYDVDH
IVPQSFLKDD SIDNKVLTRS DKNRGKSDNV PSEEVVKKMK
NYWRQLLNAK LITQRKFDNL TKAERGGLSE LDKAGFIKRQ
LVETRQITKH VAQILDSRMN TKYDENDKLI REVKVITLKS
KLVSDFRKDF QFYKVREINN YHHAHDAYLN AVVGTALIKK
YPKLESEFVY GDYKVYDVRK MIAKSEQEIG KATAKYFFYS
NIMNFFKTEI TLANGEIRKR PLIETNGETG EIVWDKGRDF
ATVRKVLSMP QVNIVKKTEV QTGGFSKESI LPKRNSDKLI
ARKKDWDPKK YGGFDSPTVA YSVLVVAKVE KGKSKKLKSV
KELLGITIME RSSFEKNPID FLEAKGYKEV KKDLIIKLPK
YSLFELENGR KRMLASAGEL QKGNELALPS KYVNFLYLAS
HYEKLKGSPE DNEQKQLFVE QHKHYLDEII EQISEFSKRV
ILADANLDKV LSAYNKHRDK PIREQAENII HLFTLTNLGA
PAAFKYFDTT IDRKRYTSTK EVLDATLIHQ SITGLYETRI
DLSQLGGD,

or an amino acid sequence that is at least 60%, at least 65%, at least 70%, at least 75%, at least 80%, at least 85%, at least 90%, at least 95%, at least 96%, at least 97%, at least 98%, at least 99%, or at least 99.5% identical to SEQ ID NO: 1.

[0332] It should be appreciated that the disclosure provides amino acid sequences (e.g., Cas9 and circularly permuted Cas9) that do not include an N-terminal methionine residue. For example, the disclosure provides the Cas9 sequence of SEQ ID NO: 1 in which the N-terminal methionine residue is absent.

[0333] In other embodiments, the Cas moiety is a Cas9 from: Corynebacterium ulcerans (NCBI Refs: NC_015683.1, NC_017317.1); Corynebacterium diphtheria (NCBI Refs: NC_016782.1, NC_016786.1); Spiroplasma syrphidicola (NCBI Ref: NC_021284.1); Prevotella intermedia (NCBI Ref: NC_017861.1); Spiroplasma taiwanense (NCBI Ref: NC_021846.1); Streptococcus iniae (NCBI Ref: NC_021314.1); Belliella baltica (NCBI Ref: NC_018010.1); Psychroflexus torquis I (NCBI Ref: NC_018721.1); Streptococcus thermophilus (NCBI Ref: YP_820832.1); Listeria innocua (NCBI Ref: NP_472073.1); Campylobacter jejuni (NCBI Ref: YP_002344900.1); or Neisseria. meningitidis (NCBI Ref: YP_002342100.1), or an amino acid sequence that is at least 60%, at least 65%, at least 70%, at least 75%, at least 80%, at least 85%, at least 90%, at least 95%, at least 96%, at least 97%, at least 98%, at least 99%, or at least 99.5% identical to any of the above-listed Cas moieties.

[0334] In some embodiments, the disclosure contemplates Cas9 proteins having the amino acid sequence of a Cas9 as indicated by any of the following accession numbers: WP_010922251.1; WP_010922251.1; AIT42264.1; AKQ21048.1; AKS40380.1; WP_011285506.1; WP_032462016.1; AKA60242.1; 4UN5_B; WP_020905136.1; WP_011284745.1; WP_038431314.1; WP_002989955.1; WP_011527619.1; WP_032464890.1; WP_030125963.1; WP_030126706.1; WP_032462936.1; WP_014407541.1; WP_038434062.1; WP_011054416.1; WP_031488318.1; WP_032460140.1; WP_032461047.1; WP_012560673.1; WP_038432938.1; WP_023080005.1; WP_023610282.1; WP_049519324.1; WP_048327215.1; WP_014612333.1; WP_015017095.1; WP_015057649.1; WP_012767106.1; WP_003043819.1; AII16583.1; AKE81011.1; AGZ01981.1; BAQ51233.1; and WP_033888930.1, or an amino acid sequence that is at least 60%, at least 65%, at least 70%, at least 75%, at least 80%, at least 85%, at least 90%, at least 95%, at least 96%, at least 97%, at least 98%, at least 99%, or at least 99.5% identical to any of the above-listed Cas accession numbers.

[0335] In still other embodiments, the Cas moiety may include any CRISPR associated protein, including but not limited to, Cas1, Cas1B, Cas2, Cas3, Cas4, Cas5, Cas6, Cas7, Cas8, Cas9 (also known as Csn1 and Csx12), Cas10, Csy1, Csy2, Csy3, Cse1, Cse2, Csc1, Csc2, Csa5, Csn2. Csm2, Csm3, Csm4, Csm5, Csm6, Cmr1, Cmr3, Cmr4, Cmr5, Cmr6, Csb1, Csb2, Csb3, Csx17, Csx14, Csx10, Csx16, CsaX, Csx3, Csx1, Csx15, Csf1, Csf2, Csf3, Csf4, homologs thereof, or modified versions thereof. These enzymes are known; for example, the amino acid sequence of S. pyogenes Cas9 protein may be found in the SwissProt database under accession number Q99ZW2. In some embodiments, the unmodified CRISPR enzyme has DNA cleavage activity, such as Cas9. In some embodiments the CRISPR enzyme is Cas9, and may be Cas9 from S. pyogenes or S. pneumonia. In some embodiments, the CRISPR enzyme directs cleavage of one or both strands at the location of a target sequence, such as within the target sequence and/or within the complement of the target sequence. In some embodiments, the CRISPR enzyme directs cleavage of one or both strands within about 1, 2, 3, 4, 5, 6, 7, 8, 9, 10, 15, 20, 25, 50, 100, 200, 500, or more base pairs from the first or last nucleotide of a target sequence. In some embodiments, a vector encodes a CRISPR enzyme that is mutated to with respect to a corresponding wild-type enzyme such that the mutated CRISPR enzyme lacks the ability to cleave one or both strands of a target polynucleotide containing a target sequence. For example, an aspartate-to-alanine substitution (D10A) in the RuvC I catalytic domain of Cas9 from S. pyogenes converts Cas9 from a nuclease that cleaves both strands to a nickase (cleaves a single strand). Other examples of mutations that render Cas9 a nickase include, without limitation, H840A, N854A, and N863A.

[0336] A Cas moiety may also be referred to as a casn1 nuclease or a CRISPR (clustered regularly interspaced short palindromic repeat)-associated nuclease.

[0337] The Cas moiety may include any suitable homologs and/or orthologs. Cas9 homologs and/or orthologs have been described in various species, including, but not limited to, S. pyogenes and S. thermophilus. Additional suitable Cas9 nucleases and sequences will be apparent to those of skill in the art based on this disclosure, and such Cas9 nucleases and sequences include Cas9 sequences from the organisms and loci disclosed in Chylinski, Rhun, and Charpentier, “The tracrRNA and Cas9 families of type II CRISPR-Cas immunity systems” (2013) RNA Biology 10:5, 726-737; the entire contents of which are incorporated herein by reference. In some embodiments, a Cas9 nuclease has an inactive (e.g., an inactivated) DNA cleavage domain, that is, the Cas9 is a nickase.

[0338] In various embodiments, the improved base editors may comprise a nuclease-inactivated Cas protein, which may interchangeably be referred to as a “dCas” or “dCas9” protein (for nuclease-“dead” Cas9). Methods for generating a Cas9 protein (or a fragment thereof) having an inactive DNA cleavage domain are known (See, e.g., Jinek et al., Science. 337:816-821(2012); Qi et al., “Repurposing CRISPR as an RNA-Guided Platform for Sequence-Specific Control of Gene Expression” (2013) Cell. 28; 152(5):1173-83, the entire contents of each of which are incorporated herein by reference). For example, the DNA cleavage domain of Cas9 is known to include two subdomains, the HNH nuclease subdomain and the RuvC1 subdomain. The HNH subdomain cleaves the strand complementary to the gRNA, whereas the RuvC1 subdomain cleaves the non-complementary strand. Mutations within these subdomains can silence the nuclease activity of Cas9. For example, the mutations D10A and H840A completely inactivate the nuclease activity of S. pyogenes Cas9 (Jinek et al., Science. 337:816-821(2012); Qi et al., Cell. 28; 152(5):1173-83 (2013)). In some embodiments, proteins comprising fragments of Cas9 are provided. For example, in some embodiments, a protein comprises one of two Cas9 domains: (1) the gRNA binding domain of Cas9; or (2) the DNA cleavage domain of Cas9.

[0339] In some embodiments, proteins comprising Cas9 or fragments thereof are referred to as “Cas9 variants.” A Cas9 variant shares homology to Cas9, or a fragment thereof. For example a Cas9 variant is at least about 70% identical, at least about 80% identical, at least about 90% identical, at least about 95% identical, at least about 96% identical, at least about 97% identical, at least about 98% identical, at least about 99% identical, at least about 99.5% identical, or at least about 99.9% identical to wild type Cas9. In some embodiments, the Cas9 variant may have 1, 2, 3, 4, 5, 6, 7, 8, 9, 10, 11, 12, 13, 14, 15, 16, 17, 18, 19, 20, 21, 22, 21, 24, 25, 26, 27, 28, 29, 30, 31, 32, 33, 34, 35, 36, 37, 38, 39, 40, 41, 42, 43, 44, 45, 46, 47, 48, 49, 50 or more amino acid changes compared to a wild type Cas9. In some embodiments, the Cas9 variant comprises a fragment of Cas9 (e.g., a gRNA binding domain or a DNA-cleavage domain), such that the fragment is at least about 70% identical, at least about 80% identical, at least about 90% identical, at least about 95% identical, at least about 96% identical, at least about 97% identical, at least about 98% identical, at least about 99% identical, at least about 99.5% identical, or at least about 99.9% identical to the corresponding fragment of wild type Cas9. In some embodiments, the fragment is is at least 30%, at least 35%, at least 40%, at least 45%, at least 50%, at least 55%, at least 60%, at least 65%, at least 70%, at least 75%, at least 80%, at least 85%, at least 90%, at least 95% identical, at least 96%, at least 97%, at least 98%, at least 99%, or at least 99.5% of the amino acid length of a corresponding wild type Cas9 (e.g., SEQ ID NO: 1).

[0340] In some embodiments, the Cas9 fragment is at least 100 amino acids in length. In some embodiments, the fragment is at least 100, 150, 200, 250, 300, 350, 400, 450, 500, 550, 600, 650, 700, 750, 800, 850, 900, 950, 1000, 1050, 1100, 1150, 1200, 1250, or at least 1300 amino acids in length. In some embodiments, wild type Cas9 corresponds to Cas9 from Streptococcus pyogenes (NCBI Reference Sequence: NC_017053.1). In other embodiments, wild type Cas9 corresponds to Cas9 from Streptococcus pyogenes (NCBI Reference Sequence: NC_002737.2). In still other embodiments, dCas9 corresponds to, or comprises in part or in whole, a Cas9 amino acid sequence having one or more mutations that inactivate the Cas9 nuclease activity.

[0341] In some embodiments, the Cas9 domain comprises a D10A mutation, while the residue at position 840 relative to a wild type sequence such as Cas9 from Streptococcus pyogenes (NCBI Reference Sequence: NC_017053.1).

[0342] Without wishing to be bound by any particular theory, the presence of the catalytic residue H840 restores the activity of the Cas9 to cleave the non-edited (e.g., non-deaminated) strand containing a G opposite the targeted C. Restoration of H840 (e.g., from A840) does not result in the cleavage of the target strand containing the C. Such Cas9 variants are able to generate a single-strand DNA break (nick) at a specific location based on the gRNA-defined target sequence, leading to repair of the non-edited strand, ultimately resulting in a G to A change on the non-edited strand. Briefly, the C of a C-G basepair can be deaminated to a U by a deaminase, e.g., an APOBEC deaminase. Nicking the non-edited strand, having the G, facilitates removal of the G via mismatch repair mechanisms. UGI inhibits UDG, which prevents removal of the U.

[0343] In other embodiments, dCas9 variants having mutations other than D10A and H840A are provided, which, e.g., result in nuclease inactivated Cas9 (dCas9). Such mutations, by way of example, include other amino acid substitutions at D10 and H820, or other substitutions within the nuclease domains of Cas9 (e.g., substitutions in the HNH nuclease subdomain and/or the RuvC1 subdomain) with reference to a wild type sequence such as Cas9 from Streptococcus pyogenes (NCBI Reference Sequence: NC_017053.1). In some embodiments, variants or homologues of dCas9 (e.g., variants of Cas9 from Streptococcus pyogenes (NCBI Reference Sequence: NC_017053.1)) are provided which are at least about 70% identical, at least about 80% identical, at least about 90% identical, at least about 95% identical, at least about 98% identical, at least about 99% identical, at least about 99.5% identical, or at least about 99.9% identical to NCBI Reference Sequence: NC_017053.1. In some embodiments, variants of dCas9 (e.g., variants of NCBI Reference Sequence: NC_017053.1) are provided having amino acid sequences which are shorter, or longer than NC_017053.1 by about 5 amino acids, by about 10 amino acids, by about 15 amino acids, by about 20 amino acids, by about 25 amino acids, by about 30 amino acids, by about 40 amino acids, by about 50 amino acids, by about 75 amino acids, by about 100 amino acids or more.

[0344] In some embodiments, the improved base editors as provided herein comprise the full-length amino acid sequence of a Cas9 protein, e.g., one of the Cas9 sequences provided herein. In other embodiments, however, fusion proteins as provided herein do not comprise a full-length Cas9 sequence, but only a fragment thereof. For example, in some embodiments, a Cas9 fusion protein provided herein comprises a Cas9 fragment, wherein the fragment binds crRNA and tracrRNA or sgRNA, but does not comprise a functional nuclease domain, e.g., in that it comprises only a truncated version of a nuclease domain or no nuclease domain at all. Exemplary amino acid sequences of suitable Cas9 domains and Cas9 fragments are provided herein, and additional suitable sequences of Cas9 domains and fragments will be apparent to those of skill in the art.

[0345] It should be appreciated that additional Cas9 proteins (e.g., a nuclease dead Cas9 (dCas9), a Cas9 nickase (nCas9), or a nuclease active Cas9), including variants and homologs thereof, are within the scope of this disclosure. Exemplary Cas9 proteins include, without limitation, those provided below. In some embodiments, the Cas9 protein is a nuclease dead Cas9 (dCas9). In some embodiments, the dCas9 comprises the amino acid sequence (SEQ ID NO: 32). In some embodiments, the Cas9 protein is a Cas9 nickase (nCas9).

[0346] In certain embodiments, the improved base editors of the invention can include a catalytically inactive Cas9 (dCas9) having the following reference sequence:

(SEQ ID NO: 2)
DKKYSIGLAIGTNSVGWAVITDEYKVPSKKFKVLGNTDRHSIKKNLIGAL
LFDSGETAEATRLKRTARRRYTRRKNRICYLQEIFSNEMAKVDDSFFHRL
EESFLVEEDKKHERHPIFGNIVDEVAYHEKYPTIYHLRKKLVDSTDKADL
RLIYLALAHMIKFRGHFLIEGDLNPDNSDVDKLFIQLVQTYNQLFEENPI
NASGVDAKAILSARLSKSRRLENLIAQLPGEKKNGLFGNLIALSLGLTPN
FKSNFDLAEDAKLQLSKDTYDDDLDNLLAQIGDQYADLFLAAKNLSDAIL
LSDILRVNTEITKAPLSASMIKRYDEHHQDLTLLKALVRQQLPEKYKEIF
FDQSKNGYAGYIDGGASQEEFYKFIKPILEKMDGTEELLVKLNREDLLRK
QRTFDNGSIPHQIHLGELHAILRRQEDFYPFLKDNREKIEKILTFRIPYY
VGPLARGNSRFAWMTRKSEETITPWNFEEVVDKGASAQSFIERMTNFDKN
LPNEKVLPKHSLLYEYFTVYNELTKVKYVTEGMRKPAFLSGEQKKAIVDL
LFKTNRKVTVKQLKEDYFKKIECFDSVEISGVEDRFNASLGTYHDLLKII
KDKDFLDNEENEDILEDIVLTLTLFEDREMIEERLKTYAHLFDDKVMKQL
KRRRYTGWGRLSRKLINGIRDKQSGKTILDFLKSDGFANRNFMQLIHDDS
LTFKEDIQKAQVSGQGDSLHEHIANLAGSPAIKKGILQTVKVVDELVKVM
GRHKPENIVIEMARENQTTQKGQKNSRERMKRIEEGIKELGSQILKEHPV
ENTQLQNEKLYLYYLQNGRDMYVDQELDINRLSDYDVDAIVPQSFLKDDS
IDNKVLTRSDKNRGKSDNVPSEEVVKKMKNYWRQLLNAKLITQRKFDNLT
KAERGGLSELDKAGFIKRQLVETRQITKHVAQILDSRMNTKYDENDKLIR
EVKVITLKSKLVSDFRKDFQFYKVREINNYHHAHDAYLNAVVGTALIKKY
PKLESEFVYGDYKVYDVRKMIAKSEQEIGKATAKYFFYSNIMNFFKTEIT
LANGEIRKRPLIETNGETGEIVWDKGRDFATVRKVLSMPQVNIVKKTEVQ
TGGFSKESILPKRNSDKLIARKKDWDPKKYGGFDSPTVAYSVLVVAKVEK
GKSKKLKSVKELLGITIMERSSFEKNPIDFLEAKGYKEVKKDLIIKLPKY
SLFELENGRKRMLASAGELQKGNELALPSKYVNFLYLASHYEKLKGSPED
NEQKQLFVEQHKHYLDEIIEQISEFSKRVILADANLDKVLSAYNKHRDKP
IREQAENIIHLFTLTNLGAPAAFKYFDTTIDRKRYTSTKEVLDATLIHQS
ITGLYETRIDLSQLGGD,

or an evolved variant thereof that has been evolved using the continuous evolution process (e.g., PACE) described herein.

[0347] In other embodiments, the improved base editors can comprise a Cas9 nickase (nCas9) that comprises an amino acid sequence that is at least 80%, 85%, 90%, 95%, 98%, or 99% identical to the amino acid sequence of:

(SEQ ID NO: 3)
DKKYSIGLAIGTNSVGWAVITDEYKVPSKKFKVLGNTDRHSIKKNLIGAL
LFDSGETAEATRLKRTARRRYTRRKNRICYLQEIFSNEMAKVDDSFFHRL
EESFLVEEDKKHERHPIFGNIVDEVAYHEKYPTIYHLRKKLVDSTDKADL
RLIYLALAHMIKFRGHFLIEGDLNPDNSDVDKLFIQLVQTYNQLFEENPI
NASGVDAKAILSARLSKSRRLENLIAQLPGEKKNGLFGNLIALSLGLTPN
FKSNFDLAEDAKLQLSKDTYDDDLDNLLAQIGDQYADLFLAAKNLSDAIL
LSDILRVNTEITKAPLSASMIKRYDEHHQDLTLLKALVRQQLPEKYKEIF
FDQSKNGYAGYIDGGASQEEFYKFIKPILEKMDGTEELLVKLNREDLLRK
QRTFDNGSIPHQIHLGELHAILRRQEDFYPFLKDNREKIEKILTFRIPYY
VGPLARGNSRFAWMTRKSEETITPWNFEEVVDKGASAQSFIERMTNFDKN
LPNEKVLPKHSLLYEYFTVYNELTKVKYVTEGMRKPAFLSGEQKKAIVDL
LFKTNRKVTVKQLKEDYFKKIECFDSVEISGVEDRFNASLGTYHDLLKII
KDKDFLDNEENEDILEDIVLTLTLFEDREMIEERLKTYAHLFDDKVMKQL
KRRRYTGWGRLSRKLINGIRDKQSGKTILDFLKSDGFANRNFMQLIHDDS
LTFKEDIQKAQVSGQGDSLHEHIANLAGSPAIKKGILQTVKVVDELVKVM
GRHKPENIVIEMARENQTTQKGQKNSRERMKRIEEGIKELGSQILKEHPV
ENTQLQNEKLYLYYLQNGRDMYVDQELDINRLSDYDVDHIVPQSFLKDDS
IDNKVLTRSDKNRGKSDNVPSEEVVKKMKNYWRQLLNAKLITQRKFDNLT
KAERGGLSELDKAGFIKRQLVETRQITKHVAQILDSRMNTKYDENDKLIR
EVKVITLKSKLVSDFRKDFQFYKVREINNYHHAHDAYLNAVVGTALIKKY
PKLESEFVYGDYKVYDVRKMIAKSEQEIGKATAKYFFYSNIMNFFKTEIT
LANGEIRKRPLIETNGETGEIVWDKGRDFATVRKVLSMPQVNIVKKTEVQ
TGGFSKESILPKRNSDKLIARKKDWDPKKYGGFDSPTVAYSVLVVAKVEK
GKSKKLKSVKELLGITIMERSSFEKNPIDFLEAKGYKEVKKDLIIKLPKY
SLFELENGRKRMLASAGELQKGNELALPSKYVNFLYLASHYEKLKGSPED
NEQKQLFVEQHKHYLDEIIEQISEFSKRVILADANLDKVLSAYNKHRDKP
IREQAENIIHLFTLTNLGAPAAFKYFDTTIDRKRYTSTKEVLDATLIHQS
ITGLYETRIDLSQLGGD,

and can be an evolved version thereof.

[0348] In still other embodiments, the improved base editors can comprise a catalytically active Cas9 that comprises an amino acid sequence that is at least 80%, 85%, 90%, 95%, 98%, or 99% identical to the amino acid sequence of:

(SEQ ID NO: 4)
DKKYSIGLDIGTNSVGWAVITDEYKVPSKKFKVLGNTDRHSIKKNLIGAL
LFDSGETAEATRLKRTARRRYTRRKNRICYLQEIFSNEMAKVDDSFFHRL
EESFLVEEDKKHERHPIFGNIVDEVAYHEKYPTIYHLRKKLVDSTDKADL
RLIYLALAHMIKFRGHFLIEGDLNPDNSDVDKLFIQLVQTYNQLFEENPI
NASGVDAKAILSARLSKSRRLENLIAQLPGEKKNGLFGNLIALSLGLTPN
FKSNFDLAEDAKLQLSKDTYDDDLDNLLAQIGDQYADLFLAAKNLSDAIL
LSDILRVNTEITKAPLSASMIKRYDEHHQDLTLLKALVRQQLPEKYKEIF
FDQSKNGYAGYIDGGASQEEFYKFIKPILEKMDGTEELLVKLNREDLLRK
QRTFDNGSIPHQIHLGELHAILRRQEDFYPFLKDNREKIEKILTFRIPYY
VGPLARGNSRFAWMTRKSEETITPWNFEEVVDKGASAQSFIERMTNFDKN
LPNEKVLPKHSLLYEYFTVYNELTKVKYVTEGMRKPAFLSGEQKKAIVDL
LFKTNRKVTVKQLKEDYFKKIECFDSVEISGVEDRFNASLGTYHDLLKII
KDKDFLDNEENEDILEDIVLTLTLFEDREMIEERLKTYAHLFDDKVMKQL
KRRRYTGWGRLSRKLINGIRDKQSGKTILDFLKSDGFANRNFMQLIHDDS
LTFKEDIQKAQVSGQGDSLHEHIANLAGSPAIKKGILQTVKVVDELVKVM
GRHKPENIVIEMARENQTTQKGQKNSRERMKRIEEGIKELGSQILKEHPV
ENTQLQNEKLYLYYLQNGRDMYVDQELDINRLSDYDVDHIVPQSFLKDDS
IDNKVLTRSDKNRGKSDNVPSEEVVKKMKNYWRQLLNAKLITQRKFDNLT
KAERGGLSELDKAGFIKRQLVETRQITKHVAQILDSRMNTKYDENDKLIR
EVKVITLKSKLVSDFRKDFQFYKVREINNYHHAHDAYLNAVVGTALIKKY
PKLESEFVYGDYKVYDVRKMIAKSEQEIGKATAKYFFYSNIMNFFKTEIT
LANGEIRKRPLIETNGETGEIVWDKGRDFATVRKVLSMPQVNIVKKTEVQ
TGGFSKESILPKRNSDKLIARKKDWDPKKYGGFDSPTVAYSVLVVAKVEK
GKSKKLKSVKELLGITIMERSSFEKNPIDFLEAKGYKEVKKDLIIKLPKY
SLFELENGRKRMLASAGELQKGNELALPSKYVNFLYLASHYEKLKGSPED
NEQKQLFVEQHKHYLDEIIEQISEFSKRVILADANLDKVLSAYNKHRDKP
IREQAENIIHLFTLTNLGAPAAFKYFDTTIDRKRYTSTKEVLDATLIHQS
ITGLYETRIDLSQLGGD.

[0349] In some embodiments, a Cas moiety refers to a Cas9 or Cas9 homolog from archaea (e.g. nanoarchaea), which constitute a domain and kingdom of single-celled prokaryotic microbes. In some embodiments, Cas9 refers to CasX or CasY, which have been described in, for example, Burstein et al., “New CRISPR-Cas systems from uncultivated microbes.” Cell Res. 2017 Feb. 21. doi: 10.1038/cr.2017.21, the entire contents of which is hereby incorporated by reference. Using genome-resolved metagenomics, a number of CRISPR-Cas systems were identified, including the first reported Cas9 in the archaeal domain of life. This divergent Cas9 protein was found in little-studied nanoarchaea as part of an active CRISPR-Cas system. In bacteria, two previously unknown systems were discovered, CRISPR-CasX and CRISPR-CasY, which are among the most compact systems yet discovered. In some embodiments, Cas9 refers to CasX, or a variant of CasX. In some embodiments, Cas9 refers to a CasY, or a variant of CasY. It should be appreciated that other RNA-guided DNA binding proteins may be used as a nucleic acid programmable DNA binding protein (napDNAbp), and are within the scope of this disclosure.

[0350] In some embodiments, the Cas9 moiety is a nucleic acid programmable DNA binding protein (napDNAbp) of any of the fusion proteins provided herein may be a CasX or CasY protein. In some embodiments, the napDNAbp is a CasX protein. In some embodiments, the napDNAbp is a CasY protein. In some embodiments, the napDNAbp comprises an amino acid sequence that is at least 85%, at least 90%, at least 91%, at least 92%, at least 93%, at least 94%, at least 95%, at least 96%, at least 97%, at least 98%, at least 99%, or at least 99.5% identical to a naturally-occurring CasX or CasY protein. In some embodiments, the napDNAbp is a naturally-occurring CasX or CasY protein. In some embodiments, the napDNAbp comprises an amino acid sequence that is at least 85%, at least 90%, at least 91%, at least 92%, at least 93%, at least 94%, at least 95%, at least 96%, at least 97%, at least 98%, at least 99%, or at least 99.5% identical to a wild-type Cas moiety or any Cas moiety provided herein.

[0351] In various embodiments, the nucleic acid programmable DNA binding proteins include, without limitation, Cas9 (e.g., dCas9 and nCas9), CasX, CasY, Cpf1, C2c1, C2c2, C2C3, and Argonaute. One example of a nucleic acid programmable DNA-binding protein that has different PAM specificity than Cas9 is Clustered Regularly Interspaced Short Palindromic Repeats from Prevotella and Francisella 1 (Cpf1). Similar to Cas9, Cpf1 is also a class 2 CRISPR effector. It has been shown that Cpf1 mediates robust DNA interference with features distinct from Cas9. Cpf1 is a single RNA-guided endonuclease lacking tracrRNA, and it utilizes a T-rich protospacer-adjacent motif (TTN, TTTN, or YTN). Moreover, Cpf1 cleaves DNA via a staggered DNA double-stranded break. Out of 16 Cpf1-family proteins, two enzymes from Acidaminococcus and Lachnospiraceae are shown to have efficient genome-editing activity in human cells. Cpf1 proteins are known in the art and have been described previously, for example Yamano et al., “Crystal structure of Cpf1 in complex with guide RNA and target DNA.” Cell (165) 2016, p. 949-962; the entire contents of which is hereby incorporated by reference.

[0352] Also useful in the present compositions and methods are nuclease-inactive Cpf1 (dCpf1) variants that may be used as a guide nucleotide sequence-programmable DNA-binding protein domain. The Cpf1 protein has a RuvC-like endonuclease domain that is similar to the RuvC domain of Cas9 but does not have a HNH endonuclease domain, and the N-terminal of Cpf1 does not have the alfa-helical recognition lobe of Cas9. It was shown in Zetsche et al., Cell, 163, 759-771, 2015 (which is incorporated herein by reference) that, the RuvC-like domain of Cpf1 is responsible for cleaving both DNA strands and inactivation of the RuvC-like domain inactivates Cpf1 nuclease activity. For example, mutations corresponding to D917A, E1006A, or D1255A in Francisella novicida Cpf1 inactivates Cpf1 nuclease activity. In some embodiments, the dCpf1 of the present disclosure comprises mutations corresponding to D917A, E1006A, D1255A, D917A/E1006A, D917A/D1255A, E1006A/D1255A, or D917A/E1006A/D1255A in SEQ ID NO: 34. It is to be understood that any mutations, e.g., substitution mutations, deletions, or insertions that inactivate the RuvC domain of Cpf1, may be used in accordance with the present disclosure.

[0353] In some embodiments, the nucleic acid programmable DNA binding protein (napDNAbp) of any of the fusion proteins provided herein may be a Cpf1 protein. In some embodiments, the Cpf1 protein is a Cpf1 nickase (nCpf1). In some embodiments, the Cpf1 protein is a nuclease inactive Cpf1 (dCpf1). In some embodiments, the Cpf1, the nCpf1, or the dCpf1 comprises an amino acid sequence that is at least 85%, at least 90%, at least 91%, at least 92%, at least 93%, at least 94%, at least 95%, at least 96%, at least 97%, at least 98%, at least 99%, or at least 99.5% identical to any one of SEQ ID NOs: 34-41. In some embodiments, the dCpf1 comprises an amino acid sequence that is at least 85%, at least 90%, at least 91%, at least 92%, at least 93%, at least 94%, at least 95%, at least 96%, at least 97%, at least 98%, at least 99%, or at least 99.5% identical to any one of SEQ ID NOs: 34-41, and comprises mutations corresponding to D917A, E1006A, D1255A, D917A/E1006A, D917A/D1255A, E1006A/D1255A, or D917A/E1006A/D1255A in SEQ ID NO: 34. It should be appreciated that Cpf1 from other bacterial species may also be used in accordance with the present disclosure.

[0354] Other examples of Cas9 and Cas9 equivalents that may be used with the ABEs and CBEs disclosed herein are provided as follows; however, these specific examples are not meant to be limiting. The base editor fusions of the present disclosure may use any suitable napDNAbp, including any suitable Cas9 or Cas9 equivalent, which can be modified as a circular permutant or a Cas9 with a modified PAM specificity.

[0355] (a) Wild Type Canonical SpCas9

[0356] In one embodiment, the base editor constructs described herein may comprise the “canonical SpCas9” nuclease from S. pyogenes, which has been widely used as a tool for genome engineering. This Cas9 protein is a large, multi-domain protein containing two distinct nuclease domains. Point mutations can be introduced into Cas9 to abolish one or both nuclease activities, resulting in a nickase Cas9 (nCas9) or dead Cas9 (dCas9), respectively, that still retains its ability to bind DNA in a sgRNA-programmed manner. In principle, when fused to another protein or domain, Cas9 or variant thereof (e.g., nCas9) can target that protein to virtually any DNA sequence simply by co-expression with an appropriate sgRNA. As used herein, the canonical SpCas9 protein refers to the wild type protein from Streptococcus pyogenes having the following amino acid sequence:

| Description | Sequence | SEQ ID NO: |
|---|---|---|
| SpCas9 | MDKKYSIGLDIGTNSVGWAVITDEYKVPSKKFKVLGNTDRHSIKKNLIGALLFDS | SEQ ID NO: |
| Streptococcus | GETAEATRLKRTARRRYTRRKNRICYLQEIFSNEMAKVDDSFFHRLEESFLVEED | 315 |
| pyogenes | KKHERHPIFGNIVDEVAYHEKYPTIYHLRKKLVDSTDKADLRLIYLALAHMIKFR | |
| M1 | GHFLIEGDLNPDNSDVDKLFIQLVQTYNQLFEENPINASGVDAKAILSARLSKSR | |
| SwissProt | RLENLIAQLPGEKKNGLFGNLIALSLGLTPNFKSNFDLAEDAKLQLSKDTYDDDL | |
| Accession | DNLLAQIGDQYADLFLAAKNLSDAILLSDILRVNTEITKAPLSASMIKRYDEHHQ | |
| No. Q99ZW2 | DLTLLKALVRQQLPEKYKEIFFDQSKNGYAGYIDGGASQEEFYKFIKPILEKMDG | |
| Wild type | TEELLVKLNREDLLRKQRTFDNGSIPHQIHLGELHAILRRQEDFYPFLKDNREKI | |
| | EKILTFRIPYYVGPLARGNSRFAWMTRKSEETITPWNFEEVVDKGASAQSFIERM | |
| | TNFDKNLPNEKVLPKHSLLYEYFTVYNELTKVKYVTEGMRKPAFLSGEQKKAIVD | |
| | LLFKTNRKVTVKQLKEDYFKKIECFDSVEISGVEDRFNASLGTYHDLLKIIKDKD | |
| | FLDNEENEDILEDIVLTLTLFEDREMIEERLKTYAHLFDDKVMKQLKRRRYTGWG | |
| | RLSRKLINGIRDKQSGKTILDFLKSDGFANRNFMQLIHDDSLTFKEDIQKAQVSG | |
| | QGDSLHEHIANLAGSPAIKKGILQTVKVVDELVKVMGRHKPENIVIEMARENQTT | |
| | QKGQKNSRERMKRIEEGIKELGSQILKEHPVENTQLQNEKLYLYYLQNGRDMYVD | |
| | QELDINRLSDYDVDHIVPQSFLKDDSIDNKVLTRSDKNRGKSDNVPSEEVVKKMK | |
| | NYWRQLLNAKLITQRKFDNLTKAERGGLSELDKAGFIKRQLVETRQITKHVAQIL | |
| | DSRMNTKYDENDKLIREVKVITLKSKLVSDFRKDFQFYKVREINNYHHAHDAYLN | |
| | AVVGTALIKKYPKLESEFVYGDYKVYDVRKMIAKSEQEIGKATAKYFFYSNIMNF | |
| | FKTEITLANGEIRKRPLIETNGETGEIVWDKGRDFATVRKVLSMPQVNIVKKTEV | |
| | QTGGFSKESILPKRNSDKLIARKKDWDPKKYGGFDSPTVAYSVLVVAKVEKGKSK | |
| | KLKSVKELLGITIMERSSFEKNPIDFLEAKGYKEVKKDLIIKLPKYSLFELENGR | |
| | KRMLASAGELQKGNELALPSKYVNFLYLASHYEKLKGSPEDNEQKQLFVEQHKHY | |
| | LDEIIEQISEFSKRVILADANLDKVLSAYNKHRDKPIREQAENIIHLFTLTNLGA | |
| | PAAFKYFDTTIDRKRYTSTKEVLDATLIHQSITGLYETRIDLSQLGGD | |
| SpCas9 | ATGGATAAAAAATATAGCATTGGCCTGGATATTGGCACCAACAGCGTGGGCTGGG | SEQ ID NO: |
| Reverse | CGGTGATTACCGATGAATATAAAGTGCCGAGCAAAAAATTTAAAGTGCTGGGCAA | 316 |
| translation | CACCGATCGCCATAGCATTAAAAAAAACCTGATTGGCGCGCTGCTGTTTGATAGC | |
| of | GGCGAAACCGCGGAAGCGACCCGCCTGAAACGCACCGCGCGCCGCCGCTATACCC | |
| SwissProt | GCCGCAAAAACCGCATTTGCTATCTGCAGGAAATTTTTAGCAACGAAATGGCGAA | |
| Accession | AGTGGATGATAGCTTTTTTCATCGCCTGGAAGAAAGCTTTCTGGTGGAAGAAGAT | |
| No. Q99ZW2 | AAAAAACATGAACGCCATCCGATTTTTGGCAACATTGTGGATGAAGTGGCGTATC | |
| Streptococcus | ATGAAAAATATCCGACCATTTATCATCTGCGCAAAAAACTGGTGGATAGCACCGA | |
| pyogenes | TAAAGCGGATCTGCGCCTGATTTATCTGGCGCTGGCGCATATGATTAAATTTCGC | |
| | GGCCATTTTCTGATTGAAGGCGATCTGAACCCGGATAACAGCGATGTGGATAAAC | |
| | TGTTTATTCAGCTGGTGCAGACCTATAACCAGCTGTTTGAAGAAAACCCGATTAA | |
| | CGCGAGCGGCGTGGATGCGAAAGCGATTCTGAGCGCGCGCCTGAGCAAAAGCCGC | |
| | CGCCTGGAAAACCTGATTGCGCAGCTGCCGGGCGAAAAAAAAAACGGCCTGTTTG | |
| | GCAACCTGATTGCGCTGAGCCTGGGCCTGACCCCGAACTTTAAAAGCAACTTTGA | |
| | TCTGGCGGAAGATGCGAAACTGCAGCTGAGCAAAGATACCTATGATGATGATCTG | |
| | GATAACCTGCTGGCGCAGATTGGCGATCAGTATGCGGATCTGTTTCTGGCGGCGA | |
| | AAAACCTGAGCGATGCGATTCTGCTGAGCGATATTCTGCGCGTGAACACCGAAAT | |
| | TACCAAAGCGCCGCTGAGCGCGAGCATGATTAAACGCTATGATGAACATCATCAG | |
| | GATCTGACCCTGCTGAAAGCGCTGGTGCGCCAGCAGCTGCCGGAAAAATATAAAG | |
| | AAATTTTTTTTGATCAGAGCAAAAACGGCTATGCGGGCTATATTGATGGCGGCGC | |
| | GAGCCAGGAAGAATTTTATAAATTTATTAAACCGATTCTGGAAAAAATGGATGGC | |
| | ACCGAAGAACTGCTGGTGAAACTGAACCGCGAAGATCTGCTGCGCAAACAGCGCA | |
| | CCTTTGATAACGGCAGCATTCCGCATCAGATTCATCTGGGCGAACTGCATGCGAT | |
| | TCTGCGCCGCCAGGAAGATTTTTATCCGTTTCTGAAAGATAACCGCGAAAAAATT | |
| | GAAAAAATTCTGACCTTTCGCATTCCGTATTATGTGGGCCCGCTGGCGCGCGGCA | |
| | ACAGCCGCTTTGCGTGGATGACCCGCAAAAGCGAAGAAACCATTACCCCGTGGAA | |
| | CTTTGAAGAAGTGGTGGATAAAGGCGCGAGCGCGCAGAGCTTTATTGAACGCATG | |
| | ACCAACTTTGATAAAAACCTGCCGAACGAAAAAGTGCTGCCGAAACATAGCCTGC | |
| | TGTATGAATATTTTACCGTGTATAACGAACTGACCAAAGTGAAATATGTGACCGA | |
| | AGGCATGCGCAAACCGGCGTTTCTGAGCGGCGAACAGAAAAAAGCGATTGTGGAT | |
| | CTGCTGTTTAAAACCAACCGCAAAGTGACCGTGAAACAGCTGAAAGAAGATTATT | |
| | TTAAAAAAATTGAATGCTTTGATAGCGTGGAAATTAGCGGCGTGGAAGATCGCTT | |
| | TAACGCGAGCCTGGGCACCTATCATGATCTGCTGAAAATTATTAAAGATAAAGAT | |
| | TTTCTGGATAACGAAGAAAACGAAGATATTCTGGAAGATATTGTGCTGACCCTGA | |
| | CCCTGTTTGAAGATCGCGAAATGATTGAAGAACGCCTGAAAACCTATGCGCATCT | |
| | GTTTGATGATAAAGTGATGAAACAGCTGAAACGCCGCCGCTATACCGGCTGGGGC | |
| | CGCCTGAGCCGCAAACTGATTAACGGCATTCGCGATAAACAGAGCGGCAAAACCA | |
| | TTCTGGATTTTCTGAAAAGCGATGGCTTTGCGAACCGCAACTTTATGCAGCTGAT | |
| | TCATGATGATAGCCTGACCTTTAAAGAAGATATTCAGAAAGCGCAGGTGAGCGGC | |
| | CAGGGCGATAGCCTGCATGAACATATTGCGAACCTGGCGGGCAGCCCGGCGATTA | |
| | AAAAAGGCATTCTGCAGACCGTGAAAGTGGTGGATGAACTGGTGAAAGTGATGGG | |
| | CCGCCATAAACCGGAAAACATTGTGATTGAAATGGCGCGCGAAAACCAGACCACC | |
| | CAGAAAGGCCAGAAAAACAGCCGCGAACGCATGAAACGCATTGAAGAAGGCATTA | |
| | AAGAACTGGGCAGCCAGATTCTGAAAGAACATCCGGTGGAAAACACCCAGCTGCA | |
| | GAACGAAAAACTGTATCTGTATTATCTGCAGAACGGCCGCGATATGTATGTGGAT | |
| | CAGGAACTGGATATTAACCGCCTGAGCGATTATGATGTGGATCATATTGTGCCGC | |
| | AGAGCTTTCTGAAAGATGATAGCATTGATAACAAAGTGCTGACCCGCAGCGATAA | |
| | AAACCGCGGCAAAAGCGATAACGTGCCGAGCGAAGAAGTGGTGAAAAAAATGAAA | |
| | AACTATTGGCGCCAGCTGCTGAACGCGAAACTGATTACCCAGCGCAAATTTGATA | |
| | ACCTGACCAAAGCGGAACGCGGCGGCCTGAGCGAACTGGATAAAGCGGGCTTTAT | |
| | TAAACGCCAGCTGGTGGAAACCCGCCAGATTACCAAACATGTGGCGCAGATTCTG | |
| | GATAGCCGCATGAACACCAAATATGATGAAAACGATAAACTGATTCGCGAAGTGA | |
| | AAGTGATTACCCTGAAAAGCAAACTGGTGAGCGATTTTCGCAAAGATTTTCAGTT | |
| | TTATAAAGTGCGCGAAATTAACAACTATCATCATGCGCATGATGCGTATCTGAAC | |
| | GCGGTGGTGGGCACCGCGCTGATTAAAAAATATCCGAAACTGGAAAGCGAATTTG | |
| | TGTATGGCGATTATAAAGTGTATGATGTGCGCAAAATGATTGCGAAAAGCGAACA | |
| | GGAAATTGGCAAAGCGACCGCGAAATATTTTTTTTATAGCAACATTATGAACTTT | |
| | TTTAAAACCGAAATTACCCTGGCGAACGGCGAAATTCGCAAACGCCCGCTGATTG | |
| | AAACCAACGGCGAAACCGGCGAAATTGTGTGGGATAAAGGCCGCGATTTTGCGAC | |
| | CGTGCGCAAAGTGCTGAGCATGCCGCAGGTGAACATTGTGAAAAAAACCGAAGTG | |
| | CAGACCGGCGGCTTTAGCAAAGAAAGCATTCTGCCGAAACGCAACAGCGATAAAC | |
| | TGATTGCGCGCAAAAAAGATTGGGATCCGAAAAAATATGGCGGCTTTGATAGCCC | |
| | GACCGTGGCGTATAGCGTGCTGGTGGTGGCGAAAGTGGAAAAAGGCAAAAGCAAA | |
| | AAACTGAAAAGCGTGAAAGAACTGCTGGGCATTACCATTATGGAACGCAGCAGCT | |
| | TTGAAAAAAACCCGATTGATTTTCTGGAAGCGAAAGGCTATAAAGAAGTGAAAAA | |
| | AGATCTGATTATTAAACTGCCGAAATATAGCCTGTTTGAACTGGAAAACGGCCGC | |
| | AAACGCATGCTGGCGAGCGCGGGCGAACTGCAGAAAGGCAACGAACTGGCGCTGC | |
| | CGAGCAAATATGTGAACTTTCTGTATCTGGCGAGCCATTATGAAAAACTGAAAGG | |
| | CAGCCCGGAAGATAACGAACAGAAACAGCTGTTTGTGGAACAGCATAAACATTAT | |
| | CTGGATGAAATTATTGAACAGATTAGCGAATTTAGCAAACGCGTGATTCTGGCGG | |
| | ATGCGAACCTGGATAAAGTGCTGAGCGCGTATAACAAACATCGCGATAAACCGAT | |
| | TCGCGAACAGGCGGAAAACATTATTCATCTGTTTACCCTGACCAACCTGGGCGCG | |
| | CCGGCGGCGTTTAAATATTTTGATACCACCATTGATCGCAAACGCTATACCAGCA | |
| | CCAAAGAAGTGCTGGATGCGACCCTGATTCATCAGAGCATTACCGGCCTGTATGA | |
| | AACCCGCATTGATCTGAGCCAGCTGGGCGGCGAT | |

[0357] The base editors described herein may include canonical SpCas9, or any variant thereof having at least 80%, at least 85%, at least 90%, at least 95%, or at least 99% sequence identity with a wild type Cas9 sequence provided above. These variants may include SpCas9 variants containing one or more mutations, including any known mutation reported with the SwissProt Accession No. Q99ZW2 entry, which include:

| SpCas9 mutation (relative to the | Function/Characteristic (as reported) (see |
|---|---|
| amino acid sequence of the canonical | UniProtKB-Q99ZW2 (CAS9 STRPT1) entry- |
| SpCas9 sequence, SEQ ID NO: 74) | incorporated herein by reference) |
| D10A | Nickase mutant which cleaves the protospacer |
| | strand (but no cleavage of non-protospacer |
| | strand) |
| S15A | Decreased DNA cleavage activity |
| R66A | Decreased DNA cleavage activity |
| R70A | No DNA cleavage |
| R74A | Decreased DNA cleavage |
| R78A | Decreased DNA cleavage |
| 97-150 deletion | No nuclease activity |
| R165A | Decreased DNA cleavage |
| 175-307 deletion | About 50% decreased DNA cleavage |
| 312-409 deletion | No nuclease activity |
| E762A | Nickase |
| H840A | Nickase mutant which cleaves the non- |
| | protospacer strand but does not cleave the |
| | protospacer strand |
| N854A | Nickase |
| N863A | Nickase |
| H982A | Decreased DNA cleavage |
| D986A | Nickase |
| 1099-1368 deletion | No nuclease activity |
| R1333A | Reduced DNA binding |

[0358] Other wild type SpCas9 sequences that may be used in the present disclosure, include:

| Description | Sequence | SEQ ID NO: |
|---|---|---|
| SpCas9 | ATGGATAAGAAATACTCAATAGGCTTAGATATCGGCACAAATAGCGTCGGATGGGCG | SEQ ID NO: |
| Streptococcus | GTGATCACTGATGATTATAAGGTTCCGTCTAAAAAGTTCAAGGTTCTGGGAAATACA | 317 |
| pyogenes | GACCGCCACAGTATCAAAAAAAATCTTATAGGGGCTCTTTTATTTGGCAGTGGAGAG | |
| MGAS1882 | ACAGCGGAAGCGACTCGTCTCAAACGGACAGCTCGTAGAAGGTATACACGTCGGAAG | |
| wild type | AATCGTATTTGTTATCTACAGGAGATTTTTTCAAATGAGATGGCGAAAGTAGATGAT | |
| NC_017053.1 | AGTTTCTTTCATCGACTTGAAGAGTCTTTTTTGGTGGAAGAAGACAAGAAGCATGAA | |
| | CGTCATCCTATTTTTGGAAATATAGTAGATGAAGTTGCTTATCATGAGAAATATCCA | |
| | ACTATCTATCATCTGCGAAAAAAATTGGCAGATTCTACTGATAAAGCGGATTTGCGC | |
| | TTAATCTATTTGGCCTTAGCGCATATGATTAAGTTTCGTGGTCATTTTTTGATTGAG | |
| | GGAGATTTAAATCCTGATAATAGTGATGTGGACAAACTATTTATCCAGTTGGTACAA | |
| | ATCTACAATCAATTATTTGAAGAAAACCCTATTAACGCAAGTAGAGTAGATGCTAAA | |
| | GCGATTCTTTCTGCACGATTGAGTAAATCAAGACGATTAGAAAATCTCATTGCTCAG | |
| | CTCCCCGGTGAGAAGAGAAATGGCTTGTTTGGGAATCTCATTGCTTTGTCATTGGGA | |
| | TTGACCCCTAATTTTAAATCAAATTTTGATTTGGCAGAAGATGCTAAATTACAGCTT | |
| | TCAAAAGATACTTACGATGATGATTTAGATAATTTATTGGCGCAAATTGGAGATCAA | |
| | TATGCTGATTTGTTTTTGGCAGCTAAGAATTTATCAGATGCTATTTTACTTTCAGAT | |
| | ATCCTAAGAGTAAATAGTGAAATAACTAAGGCTCCCCTATCAGCTTCAATGATTAAG | |
| | CGCTACGATGAACATCATCAAGACTTGACTCTTTTAAAAGCTTTAGTTCGACAACAA | |
| | CTTCCAGAAAAGTATAAAGAAATCTTTTTTGATCAATCAAAAAACGGATATGCAGGT | |
| | TATATTGATGGGGGAGCTAGCCAAGAAGAATTTTATAAATTTATCAAACCAATTTTA | |
| | GAAAAAATGGATGGTACTGAGGAATTATTGGTGAAACTAAATCGTGAAGATTTGCTG | |
| | CGCAAGCAACGGACCTTTGACAACGGCTCTATTCCCCATCAAATTCACTTGGGTGAG | |
| | CTGCATGCTATTTTGAGAAGACAAGAAGACTTTTATCCATTTTTAAAAGACAATCGT | |
| | GAGAAGATTGAAAAAATCTTGACTTTTCGAATTCCTTATTATGTTGGTCCATTGGCG | |
| | CGTGGCAATAGTCGTTTTGCATGGATGACTCGGAAGTCTGAAGAAACAATTACCCCA | |
| | TGGAATTTTGAAGAAGTTGTCGATAAAGGTGCTTCAGCTCAATCATTTATTGAACGC | |
| | ATGACAAACTTTGATAAAAATCTTCCAAATGAAAAAGTACTACCAAAACATAGTTTG | |
| | CTTTATGAGTATTTTACGGTTTATAACGAATTGACAAAGGTCAAATATGTTACTGAG | |
| | GGAATGCGAAAACCAGCATTTCTTTCAGGTGAACAGAAGAAAGCCATTGTTGATTTA | |
| | CTCTTCAAAACAAATCGAAAAGTAACCGTTAAGCAATTAAAAGAAGATTATTTCAAA | |
| | AAAATAGAATGTTTTGATAGTGTTGAAATTTCAGGAGTTGAAGATAGATTTAATGCT | |
| | TCATTAGGCGCCTACCATGATTTGCTAAAAATTATTAAAGATAAAGATTTTTTGGAT | |
| | AATGAAGAAAATGAAGATATCTTAGAGGATATTGTTTTAACATTGACCTTATTTGAA | |
| | GATAGGGGGATGATTGAGGAAAGACTTAAAACATATGCTCACCTCTTTGATGATAAG | |
| | GTGATGAAACAGCTTAAACGTCGCCGTTATACTGGTTGGGGACGTTTGTCTCGAAAA | |
| | TTGATTAATGGTATTAGGGATAAGCAATCTGGCAAAACAATATTAGATTTTTTGAAA | |
| | TCAGATGGTTTTGCCAATCGCAATTTTATGCAGCTGATCCATGATGATAGTTTGACA | |
| | TTTAAAGAAGATATTCAAAAAGCACAGGTGTCTGGACAAGGCCATAGTTTACATGAA | |
| | CAGATTGCTAACTTAGCTGGCAGTCCTGCTATTAAAAAAGGTATTTTACAGACTGTA | |
| | AAAATTGTTGATGAACTGGTCAAAGTAATGGGGCATAAGCCAGAAAATATCGTTATT | |
| | GAAATGGCACGTGAAAATCAGACAACTCAAAAGGGCCAGAAAAATTCGCGAGAGCGT | |
| | ATGAAACGAATCGAAGAAGGTATCAAAGAATTAGGAAGTCAGATTCTTAAAGAGCAT | |
| | CCTGTTGAAAATACTCAATTGCAAAATGAAAAGCTCTATCTCTATTATCTACAAAAT | |
| | GGAAGAGACATGTATGTGGACCAAGAATTAGATATTAATCGTTTAAGTGATTATGAT | |
| | GTCGATCACATTGTTCCACAAAGTTTCATTAAAGACGATTCAATAGACAATAAGGTA | |
| | CTAACGCGTTCTGATAAAAATCGTGGTAAATCGGATAACGTTCCAAGTGAAGAAGTA | |
| | GTCAAAAAGATGAAAAACTATTGGAGACAACTTCTAAACGCCAAGTTAATCACTCAA | |
| | CGTAAGTTTGATAATTTAACGAAAGCTGAACGTGGAGGTTTGAGTGAACTTGATAAA | |
| | GCTGGTTTTATCAAACGCCAATTGGTTGAAACTCGCCAAATCACTAAGCATGTGGCA | |
| | CAAATTTTGGATAGTCGCATGAATACTAAATACGATGAAAATGATAAACTTATTCGA | |
| | GAGGTTAAAGTGATTACCTTAAAATCTAAATTAGTTTCTGACTTCCGAAAAGATTTC | |
| | CAATTCTATAAAGTACGTGAGATTAACAATTACCATCATGCCCATGATGCGTATCTA | |
| | AATGCCGTCGTTGGAACTGCTTTGATTAAGAAATATCCAAAACTTGAATCGGAGTTT | |
| | GTCTATGGTGATTATAAAGTTTATGATGTTCGTAAAATGATTGCTAAGTCTGAGCAA | |
| | GAAATAGGCAAAGCAACCGCAAAATATTTCTTTTACTCTAATATCATGAACTTCTTC | |
| | AAAACAGAAATTACACTTGCAAATGGAGAGATTCGCAAACGCCCTCTAATCGAAACT | |
| | AATGGGGAAACTGGAGAAATTGTCTGGGATAAAGGGCGAGATTTTGCCACAGTGCGC | |
| | AAAGTATTGTCCATGCCCCAAGTCAATATTGTCAAGAAAACAGAAGTACAGACAGGC | |
| | GGATTCTCCAAGGAGTCAATTTTACCAAAAAGAAATTCGGACAAGCTTATTGCTCGT | |
| | AAAAAAGACTGGGATCCAAAAAAATATGGTGGTTTTGATAGTCCAACGGTAGCTTAT | |
| | TCAGTCCTAGTGGTTGCTAAGGTGGAAAAAGGGAAATCGAAGAAGTTAAAATCCGTT | |
| | AAAGAGTTACTAGGGATCACAATTATGGAAAGAAGTTCCTTTGAAAAAAATCCGATT | |
| | GACTTTTTAGAAGCTAAAGGATATAAGGAAGTTAAAAAAGACTTAATCATTAAACTA | |
| | CCTAAATATAGTCTTTTTGAGTTAGAAAACGGTCGTAAACGGATGCTGGCTAGTGCC | |
| | GGAGAATTACAAAAAGGAAATGAGCTGGCTCTGCCAAGCAAATATGTGAATTTTTTA | |
| | TATTTAGCTAGTCATTATGAAAAGTTGAAGGGTAGTCCAGAAGATAACGAACAAAAA | |
| | CAATTGTTTGTGGAGCAGCATAAGCATTATTTAGATGAGATTATTGAGCAAATCAGT | |
| | GAATTTTCTAAGCGTGTTATTTTAGCAGATGCCAATTTAGATAAAGTTCTTAGTGCA | |
| | TATAACAAACATAGAGACAAACCAATACGTGAACAAGCAGAAAATATTATTCATTTA | |
| | TTTACGTTGACGAATCTTGGAGCTCCCGCTGCTTTTAAATATTTTGATACAACAATT | |
| | GATCGTAAACGATATACGTCTACAAAAGAAGTTTTAGATGCCACTCTTATCCATCAA | |
| | TCCATCACTGGTCTTTATGAAACACGCATTGATTTGAGTCAGCTAGGAGGTGACTGA | |
| SpCas9 | MDKKYSIGLDIGTNSVGWAVITDDYKVPSKKFKVLGNTDRHSIKKNLIGALLFGSGE | SEQ ID NO: |
| Streptococcus | TAEATRLKRTARRRYTRRKNRICYLQEIFSNEMAKVDDSFFHRLEESFLVEEDKKHE | 318 |
| pyogenes | RHPIFGNIVDEVAYHEKYPTIYHLRKKLADSTDKADLRLIYLALAHMIKFRGHFLIE | |
| MGAS1882 | GDLNPDNSDVDKLFIQLVQIYNQLFEENPINASRVDAKAILSARLSKSRRLENLIAQ | |
| wild type | LPGEKRNGLFGNLIALSLGLTPNFKSNFDLAEDAKLQLSKDTYDDDLDNLLAQIGDQ | |
| NC_017053.1 | YADLFLAAKNLSDAILLSDILRVNSEITKAPLSASMIKRYDEHHQDLTLLKALVRQQ | |
| | LPEKYKEIFFDQSKNGYAGYIDGGASQEEFYKFIKPILEKMDGTEELLVKLNREDLL | |
| | RKQRTFDNGSIPHQIHLGELHAILRRQEDFYPFLKDNREKIEKILTFRIPYYVGPLA | |
| | RGNSRFAWMTRKSEETITPWNFEEVVDKGASAQSFIERMTNFDKNLPNEKVLPKHSL | |
| | LYEYFTVYNELTKVKYVTEGMRKPAFLSGEQKKAIVDLLFKTNRKVTVKQLKEDYFK | |
| | KIECFDSVEISGVEDRFNASLGAYHDLLKIIKDKDFLDNEENEDILEDIVLTLTLFE | |
| | DRGMIEERLKTYAHLFDDKVMKQLKRRRYTGWGRLSRKLINGIRDKQSGKTILDFLK | |
| | SDGFANRNFMQLIHDDSLTFKEDIQKAQVSGQGHSLHEQIANLAGSPAIKKGILQTV | |
| | KIVDELVKVMGHKPENIVIEMARENQTTQKGQKNSRERMKRIEEGIKELGSQILKEH | |
| | PVENTQLQNEKLYLYYLQNGRDMYVDQELDINRLSDYDVDHIVPQSFIKDDSIDNKV | |
| | LTRSDKNRGKSDNVPSEEVVKKMKNYWRQLLNAKLITQRKFDNLTKAERGGLSELDK | |
| | AGFIKRQLVETRQITKHVAQILDSRMNTKYDENDKLIREVKVITLKSKLVSDFRKDF | |
| | QFYKVREINNYHHAHDAYLNAVVGTALIKKYPKLESEFVYGDYKVYDVRKMIAKSEQ | |
| | EIGKATAKYFFYSNIMNFFKTEITLANGEIRKRPLIETNGETGEIVWDKGRDFATVR | |
| | KVLSMPQVNIVKKTEVQTGGFSKESILPKRNSDKLIARKKDWDPKKYGGFDSPTVAY | |
| | SVLVVAKVEKGKSKKLKSVKELLGITIMERSSFEKNPIDFLEAKGYKEVKKDLIIKL | |
| | PKYSLFELENGRKRMLASAGELQKGNELALPSKYVNFLYLASHYEKLKGSPEDNEQK | |
| | QLFVEQHKHYLDEIIEQISEFSKRVILADANLDKVLSAYNKHRDKPIREQAENIIHL | |
| | FTLTNLGAPAAFKYFDTTIDRKRYTSTKEVLDATLIHQSITGLYETRIDLSQLGGD | |
| SpCas9 | ATGGATAAAAAGTATTCTATTGGTTTAGACATCGGCACTAATTCCGTTGGATGGGCT | SEQ ID NO: |
| Streptococcus | GTCATAACCGATGAATACAAAGTACCTTCAAAGAAATTTAAGGTGTTGGGGAACACA | 319 |
| pyogenes | GACCGTCATTCGATTAAAAAGAATCTTATCGGTGCCCTCCTATTCGATAGTGGCGAA | |
| wild type | ACGGCAGAGGCGACTCGCCTGAAACGAACCGCTCGGAGAAGGTATACACGTCGCAAG | |
| SWBC2D7W014 | AACCGAATATGTTACTTACAAGAAATTTTTAGCAATGAGATGGCCAAAGTTGACGAT | |
| | TCTTTCTTTCACCGTTTGGAAGAGTCCTTCCTTGTCGAAGAGGACAAGAAACATGAA | |
| | CGGCACCCCATCTTTGGAAACATAGTAGATGAGGTGGCATATCATGAAAAGTACCCA | |
| | ACGATTTATCACCTCAGAAAAAAGCTAGTTGACTCAACTGATAAAGCGGACCTGAGG | |
| | TTAATCTACTTGGCTCTTGCCCATATGATAAAGTTCCGTGGGCACTTTCTCATTGAG | |
| | GGTGATCTAAATCCGGACAACTCGGATGTCGACAAACTGTTCATCCAGTTAGTACAA | |
| | ACCTATAATCAGTTGTTTGAAGAGAACCCTATAAATGCAAGTGGCGTGGATGCGAAG | |
| | GCTATTCTTAGCGCCCGCCTCTCTAAATCCCGACGGCTAGAAAACCTGATCGCACAA | |
| | TTACCCGGAGAGAAGAAAAATGGGTTGTTCGGTAACCTTATAGCGCTCTCACTAGGC | |
| | CTGACACCAAATTTTAAGTCGAACTTCGACTTAGCTGAAGATGCCAAATTGCAGCTT | |
| | AGTAAGGACACGTACGATGACGATCTCGACAATCTACTGGCACAAATTGGAGATCAG | |
| | TATGCGGACTTATTTTTGGCTGCCAAAAACCTTAGCGATGCAATCCTCCTATCTGAC | |
| | ATACTGAGAGTTAATACTGAGATTACCAAGGCGCCGTTATCCGCTTCAATGATCAAA | |
| | AGGTACGATGAACATCACCAAGACTTGACACTTCTCAAGGCCCTAGTCCGTCAGCAA | |
| | CTGCCTGAGAAATATAAGGAAATATTCTTTGATCAGTCGAAAAACGGGTACGCAGGT | |
| | TATATTGACGGCGGAGCGAGTCAAGAGGAATTCTACAAGTTTATCAAACCCATATTA | |
| | GAGAAGATGGATGGGACGGAAGAGTTGCTTGTAAAACTCAATCGCGAAGATCTACTG | |
| | CGAAAGCAGCGGACTTTCGACAACGGTAGCATTCCACATCAAATCCACTTAGGCGAA | |
| | TTGCATGCTATACTTAGAAGGCAGGAGGATTTTTATCCGTTCCTCAAAGACAATCGT | |
| | GAAAAGATTGAGAAAATCCTAACCTTTCGCATACCTTACTATGTGGGACCCCTGGCC | |
| | CGAGGGAACTCTCGGTTCGCATGGATGACAAGAAAGTCCGAAGAAACGATTACTCCA | |
| | TGGAATTTTGAGGAAGTTGTCGATAAAGGTGCGTCAGCTCAATCGTTCATCGAGAGG | |
| | ATGACCAACTTTGACAAGAATTTACCGAACGAAAAAGTATTGCCTAAGCACAGTTTA | |
| | CTTTACGAGTATTTCACAGTGTACAATGAACTCACGAAAGTTAAGTATGTCACTGAG | |
| | GGCATGCGTAAACCCGCCTTTCTAAGCGGAGAACAGAAGAAAGCAATAGTAGATCTG | |
| | TTATTCAAGACCAACCGCAAAGTGACAGTTAAGCAATTGAAAGAGGACTACTTTAAG | |
| | AAAATTGAATGCTTCGATTCTGTCGAGATCTCCGGGGTAGAAGATCGATTTAATGCG | |
| | TCACTTGGTACGTATCATGACCTCCTAAAGATAATTAAAGATAAGGACTTCCTGGAT | |
| | AACGAAGAGAATGAAGATATCTTAGAAGATATAGTGTTGACTCTTACCCTCTTTGAA | |
| | GATCGGGAAATGATTGAGGAAAGACTAAAAACATACGCTCACCTGTTCGACGATAAG | |
| | GTTATGAAACAGTTAAAGAGGCGTCGCTATACGGGCTGGGGACGATTGTCGCGGAAA | |
| | CTTATCAACGGGATAAGAGACAAGCAAAGTGGTAAAACTATTCTCGATTTTCTAAAG | |
| | AGCGACGGCTTCGCCAATAGGAACTTTATGCAGCTGATCCATGATGACTCTTTAACC | |
| | TTCAAAGAGGATATACAAAAGGCACAGGTTTCCGGACAAGGGGACTCATTGCACGAA | |
| | CATATTGCGAATCTTGCTGGTTCGCCAGCCATCAAAAAGGGCATACTCCAGACAGTC | |
| | AAAGTAGTGGATGAGCTAGTTAAGGTCATGGGACGTCACAAACCGGAAAACATTGTA | |
| | ATCGAGATGGCACGCGAAAATCAAACGACTCAGAAGGGGCAAAAAAACAGTCGAGAG | |
| | CGGATGAAGAGAATAGAAGAGGGTATTAAAGAACTGGGCAGCCAGATCTTAAAGGAG | |
| | CATCCTGTGGAAAATACCCAATTGCAGAACGAGAAACTTTACCTCTATTACCTACAA | |
| | AATGGAAGGGACATGTATGTTGATCAGGAACTGGACATAAACCGTTTATCTGATTAC | |
| | GACGTCGATCACATTGTACCCCAATCCTTTTTGAAGGACGATTCAATCGACAATAAA | |
| | GTGCTTACACGCTCGGATAAGAACCGAGGGAAAAGTGACAATGTTCCAAGCGAGGAA | |
| | GTCGTAAAGAAAATGAAGAACTATTGGCGGCAGCTCCTAAATGCGAAACTGATAACG | |
| | CAAAGAAAGTTCGATAACTTAACTAAAGCTGAGAGGGGTGGCTTGTCTGAACTTGAC | |
| | AAGGCCGGATTTATTAAACGTCAGCTCGTGGAAACCCGCCAAATCACAAAGCATGTT | |
| | GCACAGATACTAGATTCCCGAATGAATACGAAATACGACGAGAACGATAAGCTGATT | |
| | CGGGAAGTCAAAGTAATCACTTTAAAGTCAAAATTGGTGTCGGACTTCAGAAAGGAT | |
| | TTTCAATTCTATAAAGTTAGGGAGATAAATAACTACCACCATGCGCACGACGCTTAT | |
| | CTTAATGCCGTCGTAGGGACCGCACTCATTAAGAAATACCCGAAGCTAGAAAGTGAG | |
| | TTTGTGTATGGTGATTACAAAGTTTATGACGTCCGTAAGATGATCGCGAAAAGCGAA | |
| | CAGGAGATAGGCAAGGCTACAGCCAAATACTTCTTTTATTCTAACATTATGAATTTC | |
| | TTTAAGACGGAAATCACTCTGGCAAACGGAGAGATACGCAAACGACCTTTAATTGAA | |
| | ACCAATGGGGAGACAGGTGAAATCGTATGGGATAAGGGCCGGGACTTCGCGACGGTG | |
| | AGAAAAGTTTTGTCCATGCCCCAAGTCAACATAGTAAAGAAAACTGAGGTGCAGACC | |
| | GGAGGGTTTTCAAAGGAATCGATTCTTCCAAAAAGGAATAGTGATAAGCTCATCGCT | |
| | CGTAAAAAGGACTGGGACCCGAAAAAGTACGGTGGCTTCGATAGCCCTACAGTTGCC | |
| | TATTCTGTCCTAGTAGTGGCAAAAGTTGAGAAGGGAAAATCCAAGAAACTGAAGTCA | |
| | GTCAAAGAATTATTGGGGATAACGATTATGGAGCGCTCGTCTTTTGAAAAGAACCCC | |
| | ATCGACTTCCTTGAGGCGAAAGGTTACAAGGAAGTAAAAAAGGATCTCATAATTAAA | |
| | CTACCAAAGTATAGTCTGTTTGAGTTAGAAAATGGCCGAAAACGGATGTTGGCTAGC | |
| | GCCGGAGAGCTTCAAAAGGGGAACGAACTCGCACTACCGTCTAAATACGTGAATTTC | |
| | CTGTATTTAGCGTCCCATTACGAGAAGTTGAAAGGTTCACCTGAAGATAACGAACAG | |
| | AAGCAACTTTTTGTTGAGCAGCACAAACATTATCTCGACGAAATCATAGAGCAAATT | |
| | TCGGAATTCAGTAAGAGAGTCATCCTAGCTGATGCCAATCTGGACAAAGTATTAAGC | |
| | GCATACAACAAGCACAGGGATAAACCCATACGTGAGCAGGCGGAAAATATTATCCAT | |
| | TTGTTTACTCTTACCAACCTCGGCGCTCCAGCCGCATTCAAGTATTTTGACACAACG | |
| | ATAGATCGCAAACGATACACTTCTACCAAGGAGGTGCTAGACGCGACACTGATTCAC | |
| | CAATCCATCACGGGATTATATGAAACTCGGATAGATTTGTCACAGCTTGGGGGTGAC | |
| | GGATCCCCCAAGAAGAAGAGGAAAGTCTCGAGCGACTACAAAGACCATGACGGTGAT | |
| | TATAAAGATCATGACATCGATTACAAGGATGACGATGACAAGGCTGCAGGA | |
| SpCas9 | MDKKYSIGLDIGTNSVGWAVITDEYKVPSKKFKVLGNTDRHSIKKNLIGALLFDSGE | SEQ ID NO: |
| Streptococcus | TAEATRLKRTARRRYTRRKNRICYLQEIFSNEMAKVDDSFFHRLEESFLVEEDKKHE | 320 |
| pyogenes | RHPIFGNIVDEVAYHEKYPTIYHLRKKLVDSTDKADLRLIYLALAHMIKFRGHFLIE | |
| wild type | GDLNPDNSDVDKLFIQLVQTYNQLFEENPINASGVDAKAILSARLSKSRRLENLIAQ | |
| Encoded | LPGEKKNGLFGNLIALSLGLTPNFKSNFDLAEDAKLQLSKDTYDDDLDNLLAQIGDQ | |
| product of | YADLFLAAKNLSDAILLSDILRVNTEITKAPLSASMIKRYDEHHQDLTLLKALVRQQ | |
| SWBC2D7W014 | LPEKYKEIFFDQSKNGYAGYIDGGASQEEFYKFIKPILEKMDGTEELLVKLNREDLL | |
| | RKQRTFDNGSIPHQIHLGELHAILRRQEDFYPFLKDNREKIEKILTFRIPYYVGPLA | |
| | RGNSRFAWMTRKSEETITPWNFEEVVDKGASAQSFIERMTNFDKNLPNEKVLPKHSL | |
| | LYEYFTVYNELTKVKYVTEGMRKPAFLSGEQKKAIVDLLFKTNRKVTVKQLKEDYFK | |
| | KIECFDSVEISGVEDRFNASLGTYHDLLKIIKDKDFLDNEENEDILEDIVLTLTLFE | |
| | DREMIEERLKTYAHLFDDKVMKQLKRRRYTGWGRLSRKLINGIRDKQSGKTILDFLK | |
| | SDGFANRNFMQLIHDDSLTFKEDIQKAQVSGQGDSLHEHIANLAGSPAIKKGILQTV | |
| | KVVDELVKVMGRHKPENIVIEMARENQTTQKGQKNSRERMKRIEEGIKELGSQILKE | |
| | HPVENTQLQNEKLYLYYLQNGRDMYVDQELDINRLSDYDVDHIVPQSFLKDDSIDNK | |
| | VLTRSDKNRGKSDNVPSEEVVKKMKNYWRQLLNAKLITQRKFDNLTKAERGGLSELD | |
| | KAGFIKRQLVETRQITKHVAQILDSRMNTKYDENDKLIREVKVITLKSKLVSDFRKD | |
| | FQFYKVREINNYHHAHDAYLNAVVGTALIKKYPKLESEFVYGDYKVYDVRKMIAKSE | |
| | QEIGKATAKYFFYSNIMNFFKTEITLANGEIRKRPLIETNGETGEIVWDKGRDFATV | |
| | RKVLSMPQVNIVKKTEVQTGGFSKESILPKRNSDKLIARKKDWDPKKYGGFDSPTVA | |
| | YSVLVVAKVEKGKSKKLKSVKELLGITIMERSSFEKNPIDFLEAKGYKEVKKDLIIK | |
| | LPKYSLFELENGRKRMLASAGELQKGNELALPSKYVNFLYLASHYEKLKGSPEDNEQ | |
| | KQLFVEQHKHYLDEIIEQISEFSKRVILADANLDKVLSAYNKHRDKPIREQAENIIH | |
| | LFTLTNLGAPAAFKYFDTTIDRKRYTSTKEVLDATLIHQSITGLYETRIDLSQLGGD | |
| | GSPKKKRKVSSDYKDHDGDYKDHDIDYKDDDDKAAG | |
| SpCas9 | ATGGATAAGAAATACTCAATAGGCTTAGATATCGGCACAAATAGCGTCGGATGGGCG | SEQ ID NO: |
| Streptococcus | GTGATCACTGATGAATATAAGGTTCCGTCTAAAAAGTTCAAGGTTCTGGGAAATACA | 321 |
| pyogenes | GACCGCCACAGTATCAAAAAAAATCTTATAGGGGCTCTTTTATTTGACAGTGGAGAG | |
| M1GAS wild | ACAGCGGAAGCGACTCGTCTCAAACGGACAGCTCGTAGAAGGTATACACGTCGGAAG | |
| type | AATCGTATTTGTTATCTACAGGAGATTTTTTCAAATGAGATGGCGAAAGTAGATGAT | |
| NC_002737.2 | AGTTTCTTTCATCGACTTGAAGAGTCTTTTTTGGTGGAAGAAGACAAGAAGCATGAA | |
| | CGTCATCCTATTTTTGGAAATATAGTAGATGAAGTTGCTTATCATGAGAAATATCCA | |
| | ACTATCTATCATCTGCGAAAAAAATTGGTAGATTCTACTGATAAAGCGGATTTGCGC | |
| | TTAATCTATTTGGCCTTAGCGCATATGATTAAGTTTCGTGGTCATTTTTTGATTGAG | |
| | GGAGATTTAAATCCTGATAATAGTGATGTGGACAAACTATTTATCCAGTTGGTACAA | |
| | ACCTACAATCAATTATTTGAAGAAAACCCTATTAACGCAAGTGGAGTAGATGCTAAA | |
| | GCGATTCTTTCTGCACGATTGAGTAAATCAAGACGATTAGAAAATCTCATTGCTCAG | |
| | CTCCCCGGTGAGAAGAAAAATGGCTTATTTGGGAATCTCATTGCTTTGTCATTGGGT | |
| | TTGACCCCTAATTTTAAATCAAATTTTGATTTGGCAGAAGATGCTAAATTACAGCTT | |
| | TCAAAAGATACTTACGATGATGATTTAGATAATTTATTGGCGCAAATTGGAGATCAA | |
| | TATGCTGATTTGTTTTTGGCAGCTAAGAATTTATCAGATGCTATTTTACTTTCAGAT | |
| | ATCCTAAGAGTAAATACTGAAATAACTAAGGCTCCCCTATCAGCTTCAATGATTAAA | |
| | CGCTACGATGAACATCATCAAGACTTGACTCTTTTAAAAGCTTTAGTTCGACAACAA | |
| | CTTCCAGAAAAGTATAAAGAAATCTTTTTTGATCAATCAAAAAACGGATATGCAGGT | |
| | TATATTGATGGGGGAGCTAGCCAAGAAGAATTTTATAAATTTATCAAACCAATTTTA | |
| | GAAAAAATGGATGGTACTGAGGAATTATTGGTGAAACTAAATCGTGAAGATTTGCTG | |
| | CGCAAGCAACGGACCTTTGACAACGGCTCTATTCCCCATCAAATTCACTTGGGTGAG | |
| | CTGCATGCTATTTTGAGAAGACAAGAAGACTTTTATCCATTTTTAAAAGACAATCGT | |
| | GAGAAGATTGAAAAAATCTTGACTTTTCGAATTCCTTATTATGTTGGTCCATTGGCG | |
| | CGTGGCAATAGTCGTTTTGCATGGATGACTCGGAAGTCTGAAGAAACAATTACCCCA | |
| | TGGAATTTTGAAGAAGTTGTCGATAAAGGTGCTTCAGCTCAATCATTTATTGAACGC | |
| | ATGACAAACTTTGATAAAAATCTTCCAAATGAAAAAGTACTACCAAAACATAGTTTG | |
| | CTTTATGAGTATTTTACGGTTTATAACGAATTGACAAAGGTCAAATATGTTACTGAA | |
| | GGAATGCGAAAACCAGCATTTCTTTCAGGTGAACAGAAGAAAGCCATTGTTGATTTA | |
| | CTCTTCAAAACAAATCGAAAAGTAACCGTTAAGCAATTAAAAGAAGATTATTTCAAA | |
| | AAAATAGAATGTTTTGATAGTGTTGAAATTTCAGGAGTTGAAGATAGATTTAATGCT | |
| | TCATTAGGTACCTACCATGATTTGCTAAAAATTATTAAAGATAAAGATTTTTTGGAT | |
| | AATGAAGAAAATGAAGATATCTTAGAGGATATTGTTTTAACATTGACCTTATTTGAA | |
| | GATAGGGAGATGATTGAGGAAAGACTTAAAACATATGCTCACCTCTTTGATGATAAG | |
| | GTGATGAAACAGCTTAAACGTCGCCGTTATACTGGTTGGGGACGTTTGTCTCGAAAA | |
| | TTGATTAATGGTATTAGGGATAAGCAATCTGGCAAAACAATATTAGATTTTTTGAAA | |
| | TCAGATGGTTTTGCCAATCGCAATTTTATGCAGCTGATCCATGATGATAGTTTGACA | |
| | TTTAAAGAAGACATTCAAAAAGCACAAGTGTCTGGACAAGGCGATAGTTTACATGAA | |
| | CATATTGCAAATTTAGCTGGTAGCCCTGCTATTAAAAAAGGTATTTTACAGACTGTA | |
| | AAAGTTGTTGATGAATTGGTCAAAGTAATGGGGCGGCATAAGCCAGAAAATATCGTT | |
| | ATTGAAATGGCACGTGAAAATCAGACAACTCAAAAGGGCCAGAAAAATTCGCGAGAG | |
| | CGTATGAAACGAATCGAAGAAGGTATCAAAGAATTAGGAAGTCAGATTCTTAAAGAG | |
| | CATCCTGTTGAAAATACTCAATTGCAAAATGAAAAGCTCTATCTCTATTATCTCCAA | |
| | AATGGAAGAGACATGTATGTGGACCAAGAATTAGATATTAATCGTTTAAGTGATTAT | |
| | GATGTCGATCACATTGTTCCACAAAGTTTCCTTAAAGACGATTCAATAGACAATAAG | |
| | GTCTTAACGCGTTCTGATAAAAATCGTGGTAAATCGGATAACGTTCCAAGTGAAGAA | |
| | GTAGTCAAAAAGATGAAAAACTATTGGAGACAACTTCTAAACGCCAAGTTAATCACT | |
| | CAACGTAAGTTTGATAATTTAACGAAAGCTGAACGTGGAGGTTTGAGTGAACTTGAT | |
| | AAAGCTGGTTTTATCAAACGCCAATTGGTTGAAACTCGCCAAATCACTAAGCATGTG | |
| | GCACAAATTTTGGATAGTCGCATGAATACTAAATACGATGAAAATGATAAACTTATT | |
| | CGAGAGGTTAAAGTGATTACCTTAAAATCTAAATTAGTTTCTGACTTCCGAAAAGAT | |
| | TTCCAATTCTATAAAGTACGTGAGATTAACAATTACCATCATGCCCATGATGCGTAT | |
| | CTAAATGCCGTCGTTGGAACTGCTTTGATTAAGAAATATCCAAAACTTGAATCGGAG | |
| | TTTGTCTATGGTGATTATAAAGTTTATGATGTTCGTAAAATGATTGCTAAGTCTGAG | |
| | CAAGAAATAGGCAAAGCAACCGCAAAATATTTCTTTTACTCTAATATCATGAACTTC | |
| | TTCAAAACAGAAATTACACTTGCAAATGGAGAGATTCGCAAACGCCCTCTAATCGAA | |
| | ACTAATGGGGAAACTGGAGAAATTGTCTGGGATAAAGGGCGAGATTTTGCCACAGTG | |
| | CGCAAAGTATTGTCCATGCCCCAAGTCAATATTGTCAAGAAAACAGAAGTACAGACA | |
| | GGCGGATTCTCCAAGGAGTCAATTTTACCAAAAAGAAATTCGGACAAGCTTATTGCT | |
| | CGTAAAAAAGACTGGGATCCAAAAAAATATGGTGGTTTTGATAGTCCAACGGTAGCT | |
| | TATTCAGTCCTAGTGGTTGCTAAGGTGGAAAAAGGGAAATCGAAGAAGTTAAAATCC | |
| | GTTAAAGAGTTACTAGGGATCACAATTATGGAAAGAAGTTCCTTTGAAAAAAATCCG | |
| | ATTGACTTTTTAGAAGCTAAAGGATATAAGGAAGTTAAAAAAGACTTAATCATTAAA | |
| | CTACCTAAATATAGTCTTTTTGAGTTAGAAAACGGTCGTAAACGGATGCTGGCTAGT | |
| | GCCGGAGAATTACAAAAAGGAAATGAGCTGGCTCTGCCAAGCAAATATGTGAATTTT | |
| | TTATATTTAGCTAGTCATTATGAAAAGTTGAAGGGTAGTCCAGAAGATAACGAACAA | |
| | AAACAATTGTTTGTGGAGCAGCATAAGCATTATTTAGATGAGATTATTGAGCAAATC | |
| | AGTGAATTTTCTAAGCGTGTTATTTTAGCAGATGCCAATTTAGATAAAGTTCTTAGT | |
| | GCATATAACAAACATAGAGACAAACCAATACGTGAACAAGCAGAAAATATTATTCAT | |
| | TTATTTACGTTGACGAATCTTGGAGCTCCCGCTGCTTTTAAATATTTTGATACAACA | |
| | ATTGATCGTAAACGATATACGTCTACAAAAGAAGTTTTAGATGCCACTCTTATCCAT | |
| | CAATCCATCACTGGTCTTTATGAAACACGCATTGATTTGAGTCAGCTAGGAGGTGAC | |
| | TGA | |
| SpCas9 | MDKKYSIGLDIGTNSVGWAVITDEYKVPSKKFKVLGNTDRHSIKKNLIGALLFDSGE | SEQ ID NO: |
| Streptococcus | TAEATRLKRTARRRYTRRKNRICYLQEIFSNEMAKVDDSFFHRLEESFLVEEDKKHE | 322 |
| pyogenes | RHPIFGNIVDEVAYHEKYPTIYHLRKKLVDSTDKADLRLIYLALAHMIKFRGHFLIE | |
| M1GAS wild | GDLNPDNSDVDKLFIQLVQTYNQLFEENPINASGVDAKAILSARLSKSRRLENLIAQ | |
| type | LPGEKKNGLFGNLIALSLGLTPNFKSNFDLAEDAKLQLSKDTYDDDLDNLLAQIGDQ | |
| Encoded | YADLFLAAKNLSDAILLSDILRVNTEITKAPLSASMIKRYDEHHQDLTLLKALVRQQ | |
| product of | LPEKYKEIFFDQSKNGYAGYIDGGASQEEFYKFIKPILEKMDGTEELLVKLNREDLL | |
| NC_002737.2 | RKQRTFDNGSIPHQIHLGELHAILRRQEDFYPFLKDNREKIEKILTFRIPYYVGPLA | |
| (100% | RGNSRFAWMTRKSEETITPWNFEEVVDKGASAQSFIERMTNFDKNLPNEKVLPKHSL | |
| identical to | LYEYFTVYNELTKVKYVTEGMRKPAFLSGEQKKAIVDLLFKTNRKVTVKQLKEDYFK | |
| the | KIECFDSVEISGVEDRFNASLGTYHDLLKIIKDKDFLDNEENEDILEDIVLTLTLFE | |
| canonical | DREMIEERLKTYAHLFDDKVMKQLKRRRYTGWGRLSRKLINGIRDKQSGKTILDFLK | |
| Q99ZW2 | SDGFANRNFMQLIHDDSLTFKEDIQKAQVSGQGDSLHEHIANLAGSPAIKKGILQTV | |
| wild type) | KVVDELVKVMGRHKPENIVIEMARENQTTQKGQKNSRERMKRIEEGIKELGSQILKE | |
| | HPVENTQLQNEKLYLYYLQNGRDMYVDQELDINRLSDYDVDHIVPQSFLKDDSIDNK | |
| | VLTRSDKNRGKSDNVPSEEVVKKMKNYWRQLLNAKLITQRKFDNLTKAERGGLSELD | |
| | KAGFIKRQLVETRQITKHVAQILDSRMNTKYDENDKLIREVKVITLKSKLVSDFRKD | |
| | FQFYKVREINNYHHAHDAYLNAVVGTALIKKYPKLESEFVYGDYKVYDVRKMIAKSE | |
| | QEIGKATAKYFFYSNIMNFFKTEITLANGEIRKRPLIETNGETGEIVWDKGRDFATV | |
| | RKVLSMPQVNIVKKTEVQTGGFSKESILPKRNSDKLIARKKDWDPKKYGGFDSPTVA | |
| | YSVLVVAKVEKGKSKKLKSVKELLGITIMERSSFEKNPIDFLEAKGYKEVKKDLIIK | |
| | LPKYSLFELENGRKRMLASAGELQKGNELALPSKYVNFLYLASHYEKLKGSPEDNEQ | |
| | KQLFVEQHKHYLDEIIEQISEFSKRVILADANLDKVLSAYNKHRDKPIREQAENIIH | |
| | LFTLTNLGAPAAFKYFDTTIDRKRYTSTKEVLDATLIHQSITGLYETRIDLSQLGGD | |

[0359] The base editors described herein may include any of the above SpCas9 sequences, or any variant thereof having at least 80%, at least 85%, at least 90%, at least 95%, or at least 99% sequence identity thereto.

[0360] (b) Wild Type Cas9 Orthologs

[0361] In other embodiments, the Cas9 protein can be a wild type Cas9 ortholog from another bacterial species. For example, the following Cas9 orthologs can be used in connection with the base editor constructs described in this specification. In addition, any variant Cas9 orthologs having at least 80%, at least 85%, at least 90%, at least 95%, or at least 99% sequence identity to any of the below orthologs may also be used with the present base editors.

| Description | Sequence |
|---|---|
| LfCas9 | MKEYHIGLDIGTSSIGWAVTDSQFKLMRIKGKTAIGVRLFEEGKTAAERRTFRTTRRRLKRRKWRLHYLDEI |
| Lactobacillus | FAPHLQEVDENFLRRLKQSNIHPEDPTKNQAFIGKLLFPDLLKKNERGYPTLIKMRDELPVEQRAHYPVMNI |
| fermentum | YKLREAMINEDRQFDLREVYLAVHHIVKYRGHFLNNASVDKFKVGRIDFDKSFNVLNEAYEELQNGEGSFTI |
| wild type | EPSKVEKIGQLLLDTKMRKLDRQKAVAKLLEVKVADKEETKRNKQIATAMSKLVLGYKADFATVAMANGNEW |
| GenBank: | KIDLSSETSEDEIEKFREELSDAQNDILTEITSLFSQIMLNEIVPNGMSISESMMDRYWTHERQLAEVKEYL |
| SNX31424.11 | ATQPASARKEFDQVYNKYIGQAPKERGFDLEKGLKKILSKKENWKEIDELLKAGDFLPKQRTSANGVIPHQM |
| | HQQELDRIIEKQAKYYPWLATENPATGERDRHQAKYELDQLVSFRIPYYVGPLVTPEVQKATSGAKFAWAKR |
| | KEDGEITPWNLWDKIDRAESAEAFIKRMTVKDTYLLNEDVLPANSLLYQKYNVLNELNNVRVNGRRLSVGIK |
| | QDIYTELFKKKKTVKASDVASLVMAKTRGVNKPSVEGLSDPKKFNSNLATYLDLKSIVGDKVDDNRYQTDLE |
| | NIIEWRSVFEDGEIFADKLTEVEWLTDEQRSALVKKRYKGWGRLSKKLLTGIVDENGQRIIDLMWNTDQNFK |
| | EIVDQPVFKEQIDQLNQKAITNDGMTLRERVESVLDDAYTSPQNKKAIWQVVRVVEDIVKAVGNAPKSISIE |
| | FARNEGNKGEITRSRRTQLQKLFEDQAHELVKDTSLTEELEKAPDLSDRYYFYFTQGGKDMYTGDPINFDEI |
| | STKYDIDHILPQSFVKDNSLDNRVLTSRKENNKKSDQVPAKLYAAKMKPYWNQLLKQGLITQRKFENLTKDV |
| | DQNIKYRSLGFVKRQLVETRQVIKLTANILGSMYQEAGTEIIETRAGLTKQLREEFDLPKVREVNDYHHAVD |
| | AYLTTFAGQYLNRRYPKLRSFFVYGEYMKFKHGSDLKLRNFNFFHELMEGDKSQGKVVDQQTGELITTRDEV |
| | AKSFDRLLNMKYMLVSKEVHDRSDQLYGATIVTAKESGKLTSPIEIKKNRLVDLYGAYTNGTSAFMTIIKFT |
| | GNKPKYKVIGIPTTSAASLKRAGKPGSESYNQELHRIIKSNPKVKKGFEIVVPHVSYGQLIVDGDCKFTLAS |
| | PTVQHPATQLVLSKKSLETISSGYKILKDKPAIANERLIRVFDEVVGQMNRYFTIFDQRSNRQKVADARDKF |
| | LSLPTESKYEGAKKVQVGKTEVITNLLMGLHANATQGDLKVLGLATFGFFQSTTGLSLSEDTMIVYQSPTGL |
| | FERRICLKDI |
| | (SEQ ID NO: 323) |
| SaCas9 | MDKKYSIGLDIGTNSVGWAVITDEYKVPSKKFKVLGNTDRHSIKKNLIGALLFDSGETAEATRLKRTARRRY |
| Staphylococcus | TRRKNRICYLQEIFSNEMAKVDDSFFHRLEESFLVEEDKKHERHPIFGNIVDEVAYHEKYPTIYHLRKKLVD |
| aureus | STDKADLRLIYLALAHMIKFRGHFLIEGDLNPDNSDVDKLFIQLVQTYNQLFEENPINASGVDAKAILSARL |
| wild type | SKSRRLENLIAQLPGEKKNGLFGNLIALSLGLTPNFKSNFDLAEDAKLQLSKDTYDDDLDNLLAQIGDQYAD |
| GenBank: | LFLAAKNLSDAILLSDILRVNTEITKAPLSASMIKRYDEHHQDLTLLKALVRQQLPEKYKEIFFDQSKNGYA |
| AYD60528.1 | GYIDGGASQEEFYKFIKPILEKMDGTEELLVKLNREDLLRKQRTFDNGSIPHQIHLGELHAILRRQEDFYPF |
| | LKDNREKIEKILTFRIPYYVGPLARGNSRFAWMTRKSEETITPWNFEEVVDKGASAQSFIERMTNFDKNLPN |
| | EKVLPKHSLLYEYFTVYNELTKVKYVTEGMRKPAFLSGEQKKAIVDLLFKTNRKVTVKQLKEDYFKKIECFD |
| | SVEISGVEDRFNASLGTYHDLLKIIKDKDFLDNEENEDILEDIVLTLTLFEDREMIEERLKTYAHLFDDKVM |
| | KQLKRRRYTGWGRLSRKLINGIRDKQSGKTILDFLKSDGFANRNFMQLIHDDSLTFKEDIQKAQVSGQGDSL |
| | HEHIANLAGSPAIKKGILQTVKVVDELVKVMGRHKPENIVIEMARENQTTQKGQKNSRERMKRIEEGIKELG |
| | SQILKEHPVENTQLQNEKLYLYYLQNGRDMYVDQELDINRLSDYDVDHIVPQSFLKDDSIDNKVLTRSDKNR |
| | GKSDNVPSEEVVKKMKNYWRQLLNAKLITQRKFDNLTKAERGGLSELDKAGFIKRQLVETRQITKHVAQILD |
| | SRMNTKYDENDKLIREVKVITLKSKLVSDFRKDFQFYKVREINNYHHAHDAYLNAVVGTALIKKYPKLESEF |
| | VYGDYKVYDVRKMIAKSEQEIGKATAKYFFYSNIMNFFKTEITLANGEIRKRPLIETNGETGEIVWDKGRDF |
| | ATVRKVLSMPQVNIVKKTEVQTGGFSKESILPKRNSDKLIARKKDWDPKKYGGFDSPTVAYSVLVVAKVEKG |
| | KSKKLKSVKELLGITIMERSSFEKNPIDFLEAKGYKEVKKDLIIKLPKYSLFELENGRKRMLASAGELQKGN |
| | ELALPSKYVNFLYLASHYEKLKGSPEDNEQKQLFVEQHKHYLDEIIEQISEFSKRVILADANLDKVLSAYNK |
| | HRDKPIREQAENIIHLFTLTNLGAPAAFKYFDTTIDRKRYTSTKEVLDATLIHQSITGLYETRIDLSQLGGD |
| | (SEQ ID NO: 324) |
| SaCas9 | MGKRNYILGLDIGITSVGYGIIDYETRDVIDAGVRLFKEANVENNEGRRSKRGARRLKRRRRHRIQRVKKLL |
| Staphylococcus | FDYNLLTDHSELSGINPYEARVKGLSQKLSEEEFSAALLHLAKRRGVHNVNEVEEDTGNELSTKEQISRNSK |
| aureus | ALEEKYVAELQLERLKKDGEVRGSINRFKTSDYVKEAKQLLKVQKAYHQLDQSFIDTYIDLLETRRTYYEGP |
| | GEGSPFGWKDIKEWYEMLMGHCTYFPEELRSVKYAYNADLYNALNDLNNLVITRDENEKLEYYEKFQIIENV |
| | FKQKKKPTLKQIAKEILVNEEDIKGYRVTSTGKPEFTNLKVYHDIKDITARKEIIENAELLDQIAKILTIYQ |
| | SSEDIQEELTNLNSELTQEEIEQISNLKGYTGTHNLSLKAINLILDELWHTNDNQIAIFNRLKLVPKKVDLS |
| | QQKEIPTTLVDDFILSPVVKRSFIQSIKVINAIIKKYGLPNDIIIELAREKNSKDAQKMINEMQKRNRQTNE |
| | RIEEIIRTTGKENAKYLIEKIKLHDMQEGKCLYSLEAIPLEDLLNNPFNYEVDHIIPRSVSFDNSFNNKVLV |
| | KQEENSKKGNRTPFQYLSSSDSKISYETFKKHILNLAKGKGRISKTKKEYLLEERDINRFSVQKDFINRNLV |
| | DTRYATRGLMNLLRSYFRVNNLDVKVKSINGGFTSFLRRKWKFKKERNKGYKHHAEDALIIANADFIFKEWK |
| | KLDKAKKVMENQMFEEKQAESMPEIETEQEYKEIFITPHQIKHIKDFKDYKYSHRVDKKPNRKLINDTLYST |
| | RKDDKGNTLIVNNLNGLYDKDNDKLKKLINKSPEKLLMYHHDPQTYQKLKLIMEQYGDEKNPLYKYYEETGN |
| | YLTKYSKKDNGPVIKKIKYYGNKLNAHLDITDDYPNSRNKVVKLSLKPYRFDVYLDNGVYKFVTVKNLDVIK |
| | KENYYEVNSKCYEEAKKLKKISNQAEFIASFYKNDLIKINGELYRVIGVNNDLLNRIEVNMIDITYREYLEN |
| | MNDKRPPHIIKTIASKTQSIKKYSTDILGNLYEVKSKKHPQIIKK |
| | (SEQ ID NO: 325) |
| StCas9 | MLFNKCIIISINLDFSNKEKCMTKPYSIGLDIGTNSVGWAVITDNYKVPSKKMKVLGNTSKKYIKKNLLGVL |
| Streptococcus | LFDSGITAEGRRLKRTARRRYTRRRNRILYLQEIFSTEMATLDDAFFQRLDDSFLVPDDKRDSKYPIFGNLV |
| thermophilus | EEKVYHDEFPTIYHLRKYLADSTKKADLRLVYLALAHMIKYRGHFLIEGEFNSKNNDIQKNFQDFLDTYNAI |
| UniProtKB/ | FESDLSLENSKQLEEIVKDKISKLEKKDRILKLFPGEKNSGIFSEFLKLIVGNQADFRKCFNLDEKASLHFS |
| Swiss-Prot: | KESYDEDLETLLGYIGDDYSDVFLKAKKLYDAILLSGFLTVTDNETEAPLSSAMIKRYNEHKEDLALLKEYI |
| G3ECR1.2 | RNISLKTYNEVFKDDTKNGYAGYIDGKTNQEDFYVYLKNLLAEFEGADYFLEKIDREDFLRKQRTFDNGSIP |
| Wild type | YQIHLQEMRAILDKQAKFYPFLAKNKERIEKILTFRIPYYVGPLARGNSDFAWSIRKRNEKITPWNFEDVID |
| | KESSAEAFINRMTSFDLYLPEEKVLPKHSLLYETFNVYNELTKVRFIAESMRDYQFLDSKQKKDIVRLYFKD |
| | KRKVTDKDIIEYLHAIYGYDGIELKGIEKQFNSSLSTYHDLLNIINDKEFLDDSSNEAIIEEIIHTLTIFED |
| | REMIKQRLSKFENIFDKSVLKKLSRRHYTGWGKLSAKLINGIRDEKSGNTILDYLIDDGISNRNFMQLIHDD |
| | ALSFKKKIQKAQIIGDEDKGNIKEVVKSLPGSPAIKKGILQSIKIVDELVKVMGGRKPESIVVEMARENQYT |
| | NQGKSNSQQRLKRLEKSLKELGSKILKENIPAKLSKIDNNALQNDRLYLYYLQNGKDMYTGDDLDIDRLSNY |
| | DIDHIIPQAFLKDNSIDNKVLVSSASNRGKSDDFPSLEVVKKRKTFWYQLLKSKLISQRKFDNLTKAERGGL |
| | LPEDKAGFIQRQLVETRQITKHVARLLDEKFNNKKDENNRAVRTVKIITLKSTLVSQFRKDFELYKVREIND |
| | FHHAHDAYLNAVIASALLKKYPKLEPEFVYGDYPKYNSFRERKSATEKVYFYSNIMNIFKKSISLADGRVIE |
| | RPLIEVNEETGESVWNKESDLATVRRVLSYPQVNVVKKVEEQNHGLDRGKPKGLFNANLSSKPKPNSNENLV |
| | GAKEYLDPKKYGGYAGISNSFAVLVKGTIEKGAKKKITNVLEFQGISILDRINYRKDKLNFLLEKGYKDIEL |
| | IIELPKYSLFELSDGSRRMLASILSTNNKRGEIHKGNQIFLSQKFVKLLYHAKRISNTINENHRKYVENHKK |
| | EFEELFYYILEFNENYVGAKKNGKLLNSAFQSWQNHSIDELCSSFIGPTGSERKGLFELTSRGSAADFEFLG |
| | VKIPRYRDYTPSSLLKDATLIHQSVTGLYETRIDLAKLGEG |
| | (SEQ ID NO: 326) |
| LcCas9 | MKIKNYNLALTPSTSAVGHVEVDDDLNILEPVHHQKAIGVAKFGEGETAEARRLARSARRTTKRRANRINHY |
| Lactobacillus | FNEIMKPEIDKVDPLMFDRIKQAGLSPLDERKEFRTVIFDRPNIASYYHNQFPTIWHLQKYLMITDEKADIR |
| crispatus | LIYWALHSLLKHRGHFFNTTPMSQFKPGKLNLKDDMLALDDYNDLEGLSFAVANSPEIEKVIKDRSMHKKEK |
| NCBI | IAELKKLIVNDVPDKDLAKRNNKIITQIVNAIMGNSFHLNFIFDMDLDKLTSKAWSFKLDDPELDTKFDAIS |
| Reference | GSMTDNQIGIFETLQKIYSAISLLDILNGSSNVVDAKNALYDKHKRDLNLYFKFLNTLPDEIAKTLKAGYTL |
| Sequence: | YIGNRKKDLLAARKLLKVNVAKNFSQDDFYKLINKELKSIDKQGLQTRFSEKVGELVAQNNFLPVQRSSDNV |
| WP_133478044.1 | FIPYQLNAITFNKILENQGKYYDFLVKPNPAKKDRKNAPYELSQLMQFTIPYYVGPLVTPEEQVKSGIPKTS |
| Wild type | RFAWMVRKDNGAITPWNFYDKVDIEATADKFIKRSIAKDSYLLSELVLPKHSLLYEKYEVFNELSNVSLDGK |
| | KLSGGVKQILFNEVFKKTNKVNTSRILKALAKHNIPGSKITGLSNPEEFTSSLQTYNAWKKYFPNQIDNFAY |
| | QQDLEKMIEWSTVFEDHKILAKKLDEIEWLDDDQKKFVANTRLRGWGRLSKRLLTGLKDNYGKSIMQRLETT |
| | KANFQQIVYKPEFREQIDKISQAAAKNQSLEDILANSYTSPSNRKAIRKTMSVVDEYIKLNHGKEPDKIFLM |
| | FQRSEQEKGKQTEARSKQLNRILSQLKADKSANKLFSKQLADEFSNAIKKSKYKLNDKQYFYFQQLGRDALT |
| | GEVIDYDELYKYTVLHIIPRSKLTDDSQNNKVLTKYKIVDGSVALKFGNSYSDALGMPIKAFWTELNRLKLI |
| | PKGKLLNLTTDFSTLNKYQRDGYIARQLVETQQIVKLLATIMQSRFKHTKIIEVRNSQVANIRYQFDYFRIK |
| | NLNEYYRGFDAYLAAVVGTYLYKVYPKARRLFVYGQYLKPKKTNQENQDMHLDSEKKSQGFNFLWNLLYGKQ |
| | DQIFVNGTDVIAFNRKDLITKMNTVYNYKSQKISLAIDYHNGAMFKATLFPRNDRDTAKTRKLIPKKKDYDT |
| | DIYGGYTSNVDGYMLLAEIIKRDGNKQYGFYGVPSRLVSELDTLKKTRYTEYEEKLKEIIKPELGVDLKKIK |
| | KIKILKNKVPFNQVIIDKGSKFFITSTSYRWNYRQLILSAESQQTLMDLVVDPDFSNHKARKDARKNADERL |
| | IKVYEEILYQVKNYMPMFVELHRCYEKLVDAQKTFKSLKISDKAMVLNQILILLHSNATSPVLEKLGYHTRF |
| | TLGKKHNLISENAVLVTQSITGLKENHVSIKQML |
| | (SEQ ID NO: 327) |
| PdCas9 | MTNEKYSIGLDIGTSSIGFAVVNDNNRVIRVKGKNAIGVRLFDEGKAAADRRSFRTTRRSFRTTRRRLSRRR |
| Pedicoccus | WRLKLLREIFDAYITPVDEAFFIRLKESNLSPKDSKKQYSGDILFNDRSDKDFYEKYPTIYHLRNALMTEHR |
| damnosus | KFDVREIYLAIHHIMKFRGHFLNATPANNFKVGRLNLEEKFEELNDIYQRVFPDESIEFRTDNLEQIKEVLL |
| NCBI | DNKRSRADRQRTLVSDIYQSSEDKDIEKRNKAVATEILKASLGNKAKLNVITNVEVDKEAAKEWSITFDSES |
| Reference | IDDDLAKIEGQMTDDGHEIIEVLRSLYSGITLSAIVPENHTLSQSMVAKYDLHKDHLKLFKKLINGMTDTKK |
| Sequence: | AKNLRAAYDGYIDGVKGKVLPQEDFYKQVQVNLDDSAEANEIQTYIDQDIFMPKQRTKANGSIPHQLQQQEL |
| WP_062913273.1 | DQIIENQKAYYPWLAELNPNPDKKRQQLAKYKLDELVTFRVPYYVGPMITAKDQKNQSGAEFAWMIRKEPGN |
| Wild type | ITPWNFDQKVDRMATANQFIKRMTTTDTYLLGEDVLPAQSLLYQKFEVLNELNKIRIDHKPISIEQKQQIFN |
| | DLFKQFKNVTIKHLQDYLVSQGQYSKRPLIEGLADEKRFNSSLSTYSDLCGIFGAKLVEENDRQEDLEKIIE |
| | WSTIFEDKKIYRAKLNDLTWLTDDQKEKLATKRYQGWGRLSRKLLVGLKNSEHRNIMDILWITNENFMQIQA |
| | EPDFAKLVTDANKGMLEKTDSQDVINDLYTSPQNKKAIRQILLVVHDIQNAMHGQAPAKIHVEFARGEERNP |
| | RRSVQRQRQVEAAYEKVSNELVSAKVRQEFKEAINNKRDFKDRLFLYFMQGGIDIYTGKQLNIDQLSSYQID |
| | HILPQAFVKDDSLTNRVLTNENQVKADSVPIDIFGKKMLSVWGRMKDQGLISKGKYRNLTMNPENISAHTEN |
| | GFINRQLVETRQVIKLAVNILADEYGDSTQIISVKADLSHQMREDFELLKNRDVNDYHHAFDAYLAAFIGNY |
| | LLKRYPKLESYFVYGDFKKFTQKETKMRRFNFIYDLKHCDQVVNKETGEILWTKDEDIKYIRHLFAYKKILV |
| | SHEVREKRGALYNQTIYKAKDDKGSGQESKKLIRIKDDKETKIYGGYSGKSLAYMTIVQITKKNKVSYRVIG |
| | IPTLALARLNKLENDSTENNGELYKIIKPQFTHYKVDKKNGEIIETTDDFKIVVSKVRFQQLIDDAGQFFML |
| | ASDTYKNNAQQLVISNNALKAINNTNITDCPRDDLERLDNLRLDSAFDEIVKKMDKYFSAYDANNFREKIRN |
| | SNLIFYQLPVEDQWENNKITELGKRTVLTRILQGLHANATTTDMSIFKIKTPFGQLRQRSGISLSENAQLIY |
| | QSPTGLFERRVQLNKIK |
| | (SEQ ID NO: 328) |
| FnCas9 | MKKQKFSDYYLGFDIGTNSVGWCVTDLDYNVLRFNKKDMWGSRLFEEAKTAAERRVQRNSRRRLKRRKWRLN |
| Fusobaterium | LLEEIFSNEILKIDSNFFRRLKESSLWLEDKSSKEKFTLFNDDNYKDYDFYKQYPTIFHLRNELIKNPEKKD |
| nucleatum | IRLVYLAIHSIFKSRGHFLFEGQNLKEIKNFETLYNNLIAFLEDNGINKIIDKNNIEKLEKIVCDSKKGLKD |
| NCBI | KEKEFKEIFNSDKQLVAIFKLSVGSSVSLNDLFDTDEYKKGEVEKEKISFREQIYEDDKPIYYSILGEKIEL |
| Reference | LDIAKTFYDFMVLNNILADSQYISEAKVKLYEEHKKDLKNLKYIIRKYNKGNYDKLFKDKNENNYSAYIGLN |
| Sequence: | KEKSKKEVIEKSRLKIDDLIKNIKGYLPKVEEIEEKDKAIFNKILNKIELKTILPKQRISDNGTLPYQIHEA |
| WP_060798984.1 | ELEKILENQSKYYDFLNYEENGIITKDKLLMTFKFRIPYYVGPLNSYHKDKGGNSWIVRKEEGKILPWNFEQ |
| | KVDIEKSAEEFIKRMTNKCTYLNGEDVIPKDTFLYSEYVILNELNKVQVNDEFLNEENKRKIIDELFKENKK |
| | VSEKKFKEYLLVKQIVDGTIELKGVKDSFNSNYISYIRFKDIFGEKLNLDIYKEISEKSILWKCLYGDDKKI |
| | FEKKIKNEYGDILTKDEIKKINTFKFNNWGRLSEKLLTGIEFINLETGECYSSVMDALRRTNYNLMELLSSK |
| | FTLQESINNENKEMNEASYRDLIEESYVSPSLKRAIFQTLKIYEEIRKITGRVPKKVFIEMARGGDESMKNK |
| | KIPARQEQLKKLYDSCGNDIANFSIDIKEMKNSLISYDNNSLRQKKLYLYYLQFGKCMYTGREIDLDRLLQN |
| | NDTYDIDHIYPRSKVIKDDSFDNLVLVLKNENAEKSNEYPVKKEIQEKMKSFWRFLKEKNFISDEKYKRLTG |
| | KDDFELRGFMARQLVNVRQTTKEVGKILQQIEPEIKIVYSKAEIASSFREMFDFIKVRELNDTHHAKDAYLN |
| | IVAGNVYNTKFTEKPYRYLQEIKENYDVKKIYNYDIKNAWDKENSLEIVKKNMEKNTVNITRFIKEKKGQLF |
| | DLNPIKKGETSNEIISIKPKVYNGKDDKLNEKYGYYKSLNPAYFLYVEHKEKNKRIKSFERVNLVDVNNIKD |
| | EKSLVKYLIENKKLVEPRVIKKVYKRQVILINDYPYSIVTLDSNKLMDFENLKPLFLENKYEKILKNVIKFL |
| | EDNQGKSEENYKFIYLKKKDRYEKNETLESVKDRYNLEFNEMYDKFLEKLDSKDYKNYMNNKKYQELLDVKE |
| | KFIKLNLFDKAFTLKSFLDLFNRKTMADFSKVGLTKYLGKIQKISSNVLSKNELYLLEESVTGLFVKKIKL |
| | (SEQ ID NO: 329) |
| EcCas9 | RRKQRIQILQELLGEEVLKTDPGFFHRMKESRYVVEDKRTLDGKQVELPYALFVDKDYTDKEYYKQFPTINH |
| Enterococcus | LIVYLMTTSDTPDIRLVYLALHYYMKNRGNFLHSGDINNVKDINDILEQLDNVLETFLDGWNLKLKSYVEDI |
| cecorum | KNIYNRDLGRGERKKAFVNTLGAKTKAEKAFCSLISGGSTNLAELFDDSSLKEIETPKIEFASSSLEDKIDG |
| NCBI | IQEALEDRFAVIEAAKRLYDWKTLTDILGDSSSLAEARVNSYQMHHEQLLELKSLVKEYLDRKVFQEVFVSL |
| Reference | NVANNYPAYIGHTKINGKKKELEVKRTKRNDFYSYVKKQVIEPIKKKVSDEAVLTKLSEIESLIEVDKYLPL |
| Sequence: | QVNSDNGVIPYQVKLNELTRIFDNLENRIPVLRENRDKIIKTFKFRIPYYVGSLNGVVKNGKCTNWMVRKEE |
| WP_047338501.1 | GKIYPWNFEDKVDLEASAEQFIRRMTNKCTYLVNEDVLPKYSLLYSKYLVLSELNNLRIDGRPLDVKIKQDI |
| Wild type | YENVFKKNRKVTLKKIKKYLLKEGIITDDDELSGLADDVKSSLTAYRDFKEKLGHLDLSEAQMENIILNITL |
| | FGDDKKLLKKRLAALYPFIDDKSLNRIATLNYRDWGRLSERFLSGITSVDQETGELRTIIQCMYETQANLMQ |
| | LLAEPYHFVEAIEKENPKVDLESISYRIVNDLYVSPAVKRQIWQTLLVIKDIKQVMKHDPERIFIEMAREKQ |
| | ESKKTKSRKQVLSEVYKKAKEYEHLFEKLNSLTEEQLRSKKIYLYFTQLGKCMYSGEPIDFENLVSANSNYD |
| | IDHIYPQSKTIDDSFNNIVLVKKSLNAYKSNHYPIDKNIRDNEKVKTLWNTLVSKGLITKEKYERLIRSTPF |
| | SDEELAGFIARQLVETRQSTKAVAEILSNWFPESEIVYSKAKNVSNFRQDFEILKVRELNDCHHAHDAYLNI |
| | VVGNAYHTKFTNSPYRFIKNKANQEYNLRKLLQKVNKIESNGVVAWVGQSENNPGTIATVKKVIRRNTVLIS |
| | RMVKEVDGQLFDLTLMKKGKGQVPIKSSDERLTDISKYGGYNKATGAYFTFVKSKKRGKVVRSFEYVPLHLS |
| | KQFENNNELLKEYIEKDRGLTDVEILIPKVLINSLFRYNGSLVRITGRGDTRLLLVHEQPLYVSNSFVQQLK |
| | SVSSYKLKKSENDNAKLTKTATEKLSNIDELYDGLLRKLDLPIYSYWFSSIKEYLVESRTKYIKLSIEEKAL |
| | VIFEILHLFQSDAQVPNLKILGLSTKPSRIRIQKNLKDTDKMSIIHQSPSGIFEHEIELTSL |
| | (SEQ ID NO: 330) |
| AhCas9 | MQNGFLGITVSSEQVGWAVTNPKYELERASRKDLWGVRLFDKAETAEDRRMFRTNRRLNQRKKNRIHYLRDI |
| Anaerostipes | FHEEVNQKDPNFFQQLDESNFCEDDRTVEFNFDTNLYKNQFPTVYHLRKYLMETKDKPDIRLVYLAFSKFMK |
| hadrus | NRGHFLYKGNLGEVMDFENSMKGFCESLEKFNIDFPTLSDEQVKEVRDILCDHKIAKTVKKKNIITITKVKS |
| NCBI | KTAKAWIGLFCGCSVPVKVLFQDIDEEIVTDPEKISFEDASYDDYIANIEKGVGIYYEAIVSAKMLFDWSIL |
| Reference | NEILGDHQLLSDAMIAEYNKHHDDLKRLQKIIKGTGSRELYQDIFINDVSGNYVCYVGHAKTMSSADQKQFY |
| Sequence: | TFLKNRLKNVNGISSEDAEWIDTEIKNGTLLPKQTKRDNSVIPHQLQLREFELILDNMQEMYPFLKENREKL |
| WP_044924278.1 | LKIFNFVIPYYVGPLKGVVRKGESTNWMVPKKDGVIHPWNFDEMVDKEASAECFISRMTGNCSYLFNEKVLP |
| Wild type | KNSLLYETFEVLNELNPLKINGEPISVELKQRIYEQLFLTGKKVTKKSLTKYLIKNGYDKDIELSGIDNEFH |
| | SNLKSHIDFEDYDNLSDEEVEQIILRITVFEDKQLLKDYLNREFVKLSEDERKQICSLSYKGWGNLSEMLLN |
| | GITVTDSNGVEVSVMDMLWNTNLNLMQILSKKYGYKAEIEHYNKEHEKTIYNREDLMDYLNIPPAQRRKVNQ |
| | LITIVKSLKKTYGVPNKIFFKISREHQDDPKRTSSRKEQLKYLYKSLKSEDEKHLMKELDELNDHELSNDKV |
| | YLYFLQKGRCIYSGKKLNLSRLRKSNYQNDIDYIYPLSAVNDRSMNNKVLTGIQENRADKYTYFPVDSEIQK |
| | KMKGFWMELVLQGFMTKEKYFRLSRENDFSKSELVSFIEREISDNQQSGRMIASVLQYYFPESKIVFVKEKL |
| | ISSFKRDFHLISSYGHNHLQAAKDAYITIVVGNVYHTKFTMDPAIYFKNHKRKDYDLNRLFLENISRDGQIA |
| | WESGPYGSIQTVRKEYAQNHIAVTKRVVEVKGGLFKQMPLKKGHGEYPLKTNDPRFGNIAQYGGYTNVTGSY |
| | FVLVESMEKGKKRISLEYVPVYLHERLEDDPGHKLLKEYLVDHRKLNHPKILLAKVRKNSLLKIDGFYYRLN |
| | GRSGNALILTNAVELIMDDWQTKTANKISGYMKRRAIDKKARVYQNEFHIQELEQLYDFYLDKLKNGVYKNR |
| | KNNQAELIHNEKEQFMELKTEDQCVLLTEIKKLFVCSPMQADLTLIGGSKHTGMIAMSSNVTKADFAVIAED |
| | PLGLRNKVIYSHKGEK (SEQ ID NO: 331) |
| KvCas9 | MSQNNNKIYNIGLDIGDASVGWAVVDEHYNLLKRHGKHMWGSRLFTQANTAVERRSSRSTRRRYNKRRERIR |
| Kandleria | LLREIMEDMVLDVDPTFFIRLANVSFLDQEDKKDYLKENYHSNYNLFIDKDFNDKTYYDKYPTIYHLRKHLC |
| vitulina | ESKEKEDPRLIYLALHHIVKYRGNFLYEGQKFSMDVSNIEDKMIDVLRQFNEINLFEYVEDRKKIDEVLNVL |
| NCBI | KEPLSKKHKAEKAFALFDTTKDNKAAYKELCAALAGNKFNVTKMLKEAELHDEDEKDISFKFSDATFDDAFV |
| Reference | EKQPLLGDCVEFIDLLHDIYSWVELQNILGSAHTSEPSISAAMIQRYEDHKNDLKLLKDVIRKYLPKKYFEV |
| Sequence: | FRDEKSKKNNYCNYINHPSKTPVDEFYKYIKKLIEKIDDPDVKTILNKIELESFMLKQNSRTNGAVPYQMQL |
| WP_031589969.1 | DELNKILENQSVYYSDLKDNEDKIRSILTFRIPYYFGPLNITKDRQFDWIIKKEGKENERILPWNANEIVDV |
| Wild type | DKTADEFIKRMRNFCTYFPDEPVMAKNSLTVSKYEVLNEINKLRINDHLIKRDMKDKMLHTLFMDHKSISAN |
| | AMKKWLVKNQYFSNTDDIKIEGFQKENACSTSLTPWIDFTKIFGKINESNYDFIEKIIYDVTVFEDKKILRR |
| | RLKKEYDLDEEKIKKILKLKYSGWSRLSKKLLSGIKTKYKDSTRTPETVLEVMERTNMNLMQVINDEKLGFK |
| | KTIDDANSTSVSGKFSYAEVQELAGSPAIKRGIWQALLIVDEIKKIMKHEPAHVYIEFARNEDEKERKDSFV |
| | NQMLKLYKDYDFEDETEKEANKHLKGEDAKSKIRSERLKLYYTQMGKCMYTGKSLDIDRLDTYQVDHIVPQS |
| | LLKDDSIDNKVLVLSSENQRKLDDLVIPSSIRNKMYGFWEKLFNNKIISPKKFYSLIKTEFNEKDQERFINR |
| | QIVETRQITKHVAQIIDNHYENTKVVTVRADLSHQFRERYHIYKNRDINDFHHAHDAYIATILGTYIGHRFE |
| | SLDAKYIYGEYKRIFRNQKNKGKEMKKNNDGFILNSMRNIYADKDTGEIVWDPNYIDRIKKCFYYKDCFVTK |
| | KLEENNGTFFNVTVLPNDTNSDKDNTLATVPVNKYRSNVNKYGGFSGVNSFIVAIKGKKKKGKKVIEVNKLT |
| | GIPLMYKNADEEIKINYLKQAEDLEEVQIGKEILKNQLIEKDGGLYYIVAPTEIINAKQLILNESQTKLVCE |
| | IYKAMKYKNYDNLDSEKIIDLYRLLINKMELYYPEYRKQLVKKFEDRYEQLKVISIEEKCNIIKQILATLHC |
| | NSSIGKIMYSDFKISTTIGRLNGRTISLDDISFIAESPTGMYSKKYKL (SEQ ID NO: 332) |
| EfCas9 | MRLFEEGHTAEDRRLKRTARRRISRRRNRLRYLQAFFEEAMTDLDENFFARLQESFLVPEDKKWHRHPIFAK |
| Enterococcus | LEDEVAYHETYPTIYHLRKKLADSSEQADLRLIYLALAHIVKYRGHFLIEGKLSTENTSVKDQFQQFMVIYN |
| faecalis | QTFVNGESRLVSAPLPESVLIEEELTEKASRTKKSEKVLQQFPQEKANGLFGQFLKLMVGNKADFKKVFGLE |
| NCBI | EEAKITYASESYEEDLEGILAKVGDEYSDVFLAAKNVYDAVELSTILADSDKKSHAKLSSSMIVRFTEHQED |
| Reference | LKKFKRFIRENCPDEYDNLFKNEQKDGYAGYIAHAGKVSQLKFYQYVKKIIQDIAGAEYFLEKIAQENFLRK |
| Sequence: | QRTFDNGVIPHQIHLAELQAIIHRQAAYYPFLKENQEKIEQLVTFRIPYYVGPLSKGDASTFAWLKRQSEEP |
| WP_016631044.1 | IRPWNLQETVDLDQSATAFIERMTNFDTYLPSEKVLPKHSLLYEKFMVFNELTKISYTDDRGIKANFSGKEK |
| Wild type | EKIFDYLFKTRRKVKKKDIIQFYRNEYNTEIVTLSGLEEDQFNASFSTYQDLLKCGLTRAELDHPDNAEKLE |
| | DIIKILTIFEDRQRIRTQLSTFKGQFSAEVLKKLERKHYTGWGRLSKKLINGIYDKESGKTILDYLVKDDGV |
| | SKHYNRNFMQLINDSQLSFKNAIQKAQSSEHEETLSETVNELAGSPAIKKGIYQSLKIVDELVAIMGYAPKR |
| | IVVEMARENQTTSTGKRRSIQRLKIVEKAMAEIGSNLLKEQPTTNEQLRDTRLFLYYMQNGKDMYTGDELSL |
| | HRLSHYDIDHIIPQSFMKDDSLDNLVLVGSTENRGKSDDVPSKEVVKDMKAYWEKLYAAGLISQRKFQRLTK |
| | GEQGGLTLEDKAHFIQRQLVETRQITKNVAGILDQRYNAKSKEKKVQIITLKASLTSQFRSIFGLYKVREVN |
| | DYHHGQDAYLNCVVATTLLKVYPNLAPEFVYGEYPKFQTFKENKATAKAIIYTNLLRFFTEDEPRFTKDGEI |
| | LWSNSYLKTIKKELNYHQMNIVKKVEVQKGGFSKESIKPKGPSNKLIPVKNGLDPQKYGGFDSPVVAYTVLF |
| | THEKGKKPLIKQEILGITIMEKTRFEQNPILFLEEKGFLRPRVLMKLPKYTLYEFPEGRRRLLASAKEAQKG |
| | NQMVLPEHLLTLLYHAKQCLLPNQSESLAYVEQHQPEFQEILERVVDFAEVHTLAKSKVQQIVKLFEANQTA |
| | DVKEIAASFIQLMQFNAMGAPSTFKFFQKDIERARYTSIKEIFDATIIYQSPTGLYETRRKVVD (SEQ ID |
| | NO: 333) |
| Staphylococcus | KRNYILGLDIGITSVGYGIIDYETRDVIDAGVRLFKEANVENNEGRRSKRGARRLKRRRRHRIQRVKKLLFD |
| aureus | YNLLTDHSELSGINPYEARVKGLSQKLSEEEFSAALLHLAKRRGVHNVNEVEEDTGNELSTKEQISRNSKAL |
| Cas9 | EEKYVAELQLERLKKDGEVRGSINRFKTSDYVKEAKQLLKVQKAYHQLDQSFIDTYIDLLETRRTYYEGPGE |
| | GSPFGWKDIKEWYEMLMGHCTYFPEELRSVKYAYNADLYNALNDLNNLVITRDENEKLEYYEKFQIIENVFK |
| | QKKKPTLKQIAKEILVNEEDIKGYRVTSTGKPEFTNLKVYHDIKDITARKEIIENAELLDQIAKILTIYQSS |
| | EDIQEELTNLNSELTQEEIEQISNLKGYTGTHNLSLKAINLILDELWHTNDNQIAIFNRLKLVPKKVDLSQQ |
| | KEIPTTLVDDFILSPVVKRSFIQSIKVINAIIKKYGLPNDIIIELAREKNSKDAQKMINEMQKRNRQTNERI |
| | EEIIRTTGKENAKYLIEKIKLHDMQEGKCLYSLEAIPLEDLLNNPFNYEVDHIIPRSVSFDNSFNNKVLVKQ |
| | EENSKKGNRTPFQYLSSSDSKISYETFKKHILNLAKGKGRISKTKKEYLLEERDINRFSVQKDFINRNLVDT |
| | RYATRGLMNLLRSYFRVNNLDVKVKSINGGFTSFLRRKWKFKKERNKGYKHHAEDALIIANADFIFKEWKKL |
| | DKAKKVMENQMFEEKQAESMPEIETEQEYKEIFITPHQIKHIKDFKDYKYSHRVDKKPNRELINDTLYSTRK |
| | DDKGNTLIVNNLNGLYDKDNDKLKKLINKSPEKLLMYHHDPQTYQKLKLIMEQYGDEKNPLYKYYEETGNYL |
| | TKYSKKDNGPVIKKIKYYGNKLNAHLDITDDYPNSRNKVVKLSLKPYRFDVYLDNGVYKFVTVKNLDVIKKE |
| | NYYEVNSKCYEEAKKLKKISNQAEFIASFYNNDLIKINGELYRVIGVNNDLLNRIEVNMIDITYREYLENMN |
| | DKRPPRIIKTIASKTQSIKKYSTDILGNLYEVKSKKHPQIIKKG |
| | (SEQ ID NO: 334) |
| Geobacillus | MKYKIGLDIGITSIGWAVINLDIPRIEDLGVRIFDRAENPKTGESLALPRRLARSARRRLRRRKHRLERIRR |
| thermodenitrificans | LFVREGILTKEELNKLFEKKHEIDVWQLRVEALDRKLNNDELARILLHLAKRRGFRSNRKSERTNKENSTML |
| Cas9 | KHIEENQSILSSYRTVAEMVVKDPKFSLHKRNKEDNYTNTVARDDLEREIKLIFAKQREYGNIVCTEAFEHE |
| | YISIWASQRPFASKDDIEKKVGFCTFEPKEKRAPKATYTFQSFTVWEHINKLRLVSPGGIRALTDDERRLIY |
| | KQAFHKNKITFHDVRTLLNLPDDTRFKGLLYDRNTTLKENEKVRFLELGAYHKIRKAIDSVYGKGAAKSFRP |
| | IDFDTFGYALTMFKDDTDIRSYLRNEYEQNGKRMENLADKVYDEELIEELLNLSFSKFGHLSLKALRNILPY |
| | MEQGEVYSTACERAGYTFTGPKKKQKTVLLPNIPPIANPVVMRALTQARKVVNAIIKKYGSPVSIHIELARE |
| | LSQSFDERRKMQKEQEGNRKKNETAIRQLVEYGLTLNPTGLDIVKFKLWSEQNGKCAYSLQPIEIERLLEPG |
| | YTEVDHVIPYSRSLDDSYTNKVLVLTKENREKGNRTPAEYLGLGSERWQQFETFVLTNKQFSKKKRDRLLRL |
| | HYDENEENEFKNRNLNDTRYISRFLANFIREHLKFADSDDKQKVYTVNGRITAHLRSRWNFNKNREESNLHH |
| | AVDAAIVACTTPSDIARVTAFYQRREQNKELSKKTDPQFPQPWPHFADELQARLSKNPKESIKALNLGNYDN |
| | EKLESLQPVFVSRMPKRSITGAAHQETLRRYIGIDERSGKIQTVVKKKLSEIQLDKTGHFPMYGKESDPRTY |
| | EAIRQRLLEHNNDPKKAFQEPLYKPKKNGELGPIIRTIKIIDTTNQVIPLNDGKTVAYNSNIVRVDVFEKDG |
| | KYYCVPIYTIDMMKGILPNKAIEPNKPYSEWKEMTEDYTFRFSLYPNDLIRIEFPREKTIKTAVGEEIKIKD |
| | LFAYYQTIDSSNGGLSLVSHDNNFSLRSIGSRTLKRFEKYQVDVLGNIYKVRGEKRVGVASSSHSKAGETIR |
| | PL |
| | (SEQ ID NO: 335) |
| ScCas9 | MEKKYSIGLDIGTNSVGWAVITDDYKVPSKKFKVLGNTNRKSIKKNLMGALLFDSGETAEATRLKRTARRRY |
| S. canis | TRRKNRIRYLQEIFANEMAKLDDSFFQRLEESFLVEEDKKNERHPIFGNLADEVAYHRNYPTIYHLRKKLAD |
| 1375 AA | SPEKADLRLIYLALAHIIKFRGHFLIEGKLNAENSDVAKLFYQLIQTYNQLFEESPLDEIEVDAKGILSARL |
| 159.2 kDa | SKSKRLEKLIAVFPNEKKNGLFGNIIALALGLTPNFKSNFDLTEDAKLQLSKDTYDDDLDELLGQIGDQYAD |
| | LFSAAKNLSDAILLSDILRSNSEVTKAPLSASMVKRYDEHHQDLALLKTLVRQQFPEKYAEIFKDDTKNGYA |
| | GYVGIGIKHRKRTTKLATQEEFYKFIKPILEKMDGAEELLAKLNRDDLLRKQRTFDNGSIPHQIHLKELHAI |
| | LRRQEEFYPFLKENREKIEKILTFRIPYYVGPLARGNSRFAWLTRKSEEAITPWNFEEVVDKGASAQSFIER |
| | MTNFDEQLPNKKVLPKHSLLYEYFTVYNELTKVKYVTERMRKPEFLSGEQKKAIVDLLFKTNRKVTVKQLKE |
| | DYFKKIECFDSVEIIGVEDRFNASLGTYHDLLKIIKDKDFLDNEENEDILEDIVLTLTLFEDREMIEERLKT |
| | YAHLFDDKVMKQLKRRHYTGWGRLSRKMINGIRDKQSGKTILDFLKSDGFSNRNFMQLIHDDSLTFKEEIEK |
| | AQVSGQGDSLHEQIADLAGSPAIKKGILQTVKIVDELVKVMGHKPENIVIEMARENQTTTKGLQQSRERKKR |
| | IEEGIKELESQILKENPVENTQLQNEKLYLYYLQNGRDMYVDQELDINRLSDYDVDHIVPQSFIKDDSIDNK |
| | VLTRSVENRGKSDNVPSEEVVKKMKNYWRQLLNAKLITQRKFDNLTKAERGGLSEADKAGFIKRQLVETRQI |
| | TKHVARILDSRMNTKRDKNDKPIREVKVITLKSKLVSDFRKDFQLYKVRDINNYHHAHDAYLNAVVGTALIK |
| | KYPKLESEFVYGDYKVYDVRKMIAKSEQEIGKATAKRFFYSNIMNFFKTEVKLANGEIRKRPLIETNGETGE |
| | VVWNKEKDFATVRKVLAMPQVNIVKKTEVQTGGFSKESILSKRESAKLIPRKKGWDTRKYGGFGSPTVAYSI |
| | LVVAKVEKGKAKKLKSVKVLVGITIMEKGSYEKDPIGFLEAKGYKDIKKELIFKLPKYSLFELENGRRRMLA |
| | SATELQKANELVLPQHLVRLLYYTQNISATTGSNNLGYIEQHREEFKEIFEKIIDFSEKYILKNKVNSNLKS |
| | SFDEQFAVSDSILLSNSFVSLLKYTSFGASGGFTFLDLDVKQGRLRYQTVTEVLDATLIYQSITGLYETRTD |
| | LSQLGGD (SEQ ID NO: 336) |

[0362] The base editors described herein may include any of the above Cas9 ortholog sequences, or any variants thereof having at least 80%, at least 85%, at least 90%, at least 95%, or at least 99% sequence identity thereto.

[0363] The napDNAbp may include any suitable homologs and/or orthologs or naturally occurring enzymes, such as, Cas9. Cas9 homologs and/or orthologs have been described in various species, including, but not limited to, S. pyogenes and S. thermophilus. Preferably, the Cas moiety is configured (e.g., mutagenized, recombinantly engineered, or otherwise obtained from nature) as a nickase, i.e., capable of cleaving only a single strand of the target. Additional suitable Cas9 nucleases and sequences will be apparent to those of skill in the art based on this disclosure, and such Cas9 nucleases and sequences include Cas9 sequences from the organisms and loci disclosed in Chylinski, Rhun, and Charpentier, “The tracrRNA and Cas9 families of type II CRISPR-Cas immunity systems” (2013) RNA Biology 10:5, 726-737; the entire contents of which are incorporated herein by reference. In some embodiments, a Cas9 nuclease has an inactive (e.g., an inactivated) DNA cleavage domain, that is, the Cas9 is a nickase. In some embodiments, the Cas9 protein comprises an amino acid sequence that is at least 80% identical to the amino acid sequence of a Cas9 protein as provided by any one of the variants of Table 3. In some embodiments, the Cas9 protein comprises an amino acid sequence that is at least 85%, at least 90%, at least 92%, at least 95%, at least 96%, at least 97%, at least 98%, at least 99%, or at least 99.5% identical to the amino acid sequence of a Cas9 protein as provided by any one of the Cas9 orthologs in the above tables.

[0364] (c) Dead Cas9 Variant

[0365] In certain embodiments, the base editors described herein may include a dead Cas9, e.g., dead SpCas9, which has no nuclease activity due to one or more mutations that inactive both nuclease domains of Cas9, namely the RuvC domain (which cleaves the non-protospacer DNA strand) and HNH domain (which cleaves the protospacer DNA strand). The nuclease inactivation may be due to one or mutations that result in one or more substitutions and/or deletions in the amino acid sequence of the encoded protein, or any variants thereof having at least 80%, at least 85%, at least 90%, at least 95%, or at least 99% sequence identity thereto.

[0366] As used herein, the term “dCas9” refers to a nuclease-inactive Cas9 or nuclease-dead Cas9, or a functional fragment thereof, and embraces any naturally occurring dCas9 from any organism, any naturally-occurring dCas9 equivalent or functional fragment thereof, any dCas9 homolog, ortholog, or paralog from any organism, and any mutant or variant of a dCas9, naturally-occurring or engineered. The term dCas9 is not meant to be particularly limiting and may be referred to as a “dCas9 or equivalent.” Exemplary dCas9 proteins and method for making dCas9 proteins are further described herein and/or are described in the art and are incorporated herein by reference.

[0367] In other embodiments, dCas9 corresponds to, or comprises in part or in whole, a Cas9 amino acid sequence having one or more mutations that inactivate the Cas9 nuclease activity. In other embodiments, Cas9 variants having mutations other than D10A and H840A are provided which may result in the full or partial inactivate of the endogenous Cas9 nuclease activity (e.g., nCas9 or dCas9, respectively). Such mutations, by way of example, include other amino acid substitutions at D10 and H820, or other substitutions within the nuclease domains of Cas9 (e.g., substitutions in the HNH nuclease subdomain and/or the RuvC1 subdomain) with reference to a wild type sequence such as Cas9 from Streptococcus pyogenes (NCBI Reference Sequence: NC_017053.1. In some embodiments, variants or homologues of Cas9 (e.g., variants of Cas9 from Streptococcus pyogenes (NCBI Reference Sequence: NC_017053.1) are provided which are at least about 70% identical, at least about 80% identical, at least about 90% identical, at least about 95% identical, at least about 98% identical, at least about 99% identical, at least about 99.5% identical, or at least about 99.9% identical to NCBI Reference Sequence: NC_017053.1. In some embodiments, variants of dCas9 (e.g., variants of NCBI Reference Sequence: NC_017053.1) are provided having amino acid sequences which are shorter, or longer than NC_017053.1 by about 5 amino acids, by about 10 amino acids, by about 15 amino acids, by about 20 amino acids, by about 25 amino acids, by about 30 amino acids, by about 40 amino acids, by about 50 amino acids, by about 75 amino acids, by about 100 amino acids or more.

[0368] In one embodiment, the dead Cas9 may be based on the canonical SpCas9 sequence of Q99ZW2 and may have the following sequence, which comprises a D10A and an H810A substitutions (underlined and bolded), or a variant of SEQ ID NO: 1 having at least 80%, at least 85%, at least 90%, at least 95%, or at least 99% sequence identity thereto:

| Description | Sequence | SEQ ID NO: |
|---|---|---|
| dead Cas9 or | MDKKYSIGLXIGTNSVGWAVITDEYKVPSKKFKVLGNTDRHSIKKNLIGALLFDSGE | SEQ ID NO: |
| dCas9 | TAEATRLKRTARRRYTRRKNRICYLQEIFSNEMAKVDDSFFHRLEESFLVEEDKKHE | 337 |
| Streptococcus | RHPIFGNIVDEVAYHEKYPTIYHLRKKLVDSTDKADLRLIYLALAHMIKFRGHFLIE | |
| pyogenes | GDLNPDNSDVDKLFIQLVQTYNQLFEENPINASGVDAKAILSARLSKSRRLENLIAQ | |
| Q99ZW2 Cas9 | LPGEKKNGLFGNLIALSLGLTPNFKSNFDLAEDAKLQLSKDTYDDDLDNLLAQIGDQ | |
| with D10X | YADLFLAAKNLSDAILLSDILRVNTEITKAPLSASMIKRYDEHHQDLTLLKALVRQQ | |
| and H810X | LPEKYKEIFFDQSKNGYAGYIDGGASQEEFYKFIKPILEKMDGTEELLVKLNREDLL | |
| Where “X” is | RKQRTFDNGSIPHQIHLGELHAILRRQEDFYPFLKDNREKIEKILTFRIPYYVGPLA | |
| any amino | RGNSRFAWMTRKSEETITPWNFEEVVDKGASAQSFIERMTNFDKNLPNEKVLPKHSL | |
| acid | LYEYFTVYNELTKVKYVTEGMRKPAFLSGEQKKAIVDLLFKTNRKVTVKQLKEDYFK | |
| | KIECFDSVEISGVEDRFNASLGTYHDLLKIIKDKDFLDNEENEDILEDIVLTLTLFE | |
| | DREMIEERLKTYAHLFDDKVMKQLKRRRYTGWGRLSRKLINGIRDKQSGKTILDFLK | |
| | SDGFANRNFMQLIHDDSLTFKEDIQKAQVSGQGDSLHEHIANLAGSPAIKKGILQTV | |
| | KVVDELVKVMGRHKPENIVIEMARENQTTQKGQKNSRERMKRIEEGIKELGSQILKE | |
| | HPVENTQLQNEKLYLYYLQNGRDMYVDQELDINRLSDYDVDXIVPQSFLKDDSIDNK | |
| | VLTRSDKNRGKSDNVPSEEVVKKMKNYWRQLLNAKLITQRKFDNLTKAERGGLSELD | |
| | KAGFIKRQLVETRQITKHVAQILDSRMNTKYDENDKLIREVKVITLKSKLVSDFRKD | |
| | FQFYKVREINNYHHAHDAYLNAVVGTALIKKYPKLESEFVYGDYKVYDVRKMIAKSE | |
| | QEIGKATAKYFFYSNIMNFFKTEITLANGEIRKRPLIETNGETGEIVWDKGRDFATV | |
| | RKVLSMPQVNIVKKTEVQTGGFSKESILPKRNSDKLIARKKDWDPKKYGGFDSPTVA | |
| | YSVLVVAKVEKGKSKKLKSVKELLGITIMERSSFEKNPIDFLEAKGYKEVKKDLIIK | |
| | LPKYSLFELENGRKRMLASAGELQKGNELALPSKYVNFLYLASHYEKLKGSPEDNEQ | |
| | KQLFVEQHKHYLDEIIEQISEFSKRVILADANLDKVLSAYNKHRDKPIREQAENIIH | |
| | LFTLTNLGAPAAFKYFDTTIDRKRYTSTKEVLDATLIHQSITGLYETRIDLSQLGGD | |
| dead Cas9 or | MDKKYSIGLAIGTNSVGWAVITDEYKVPSKKFKVLGNTDRHSIKKNLIGALLFDSGE | SEQ ID NO: |
| dCas9 | TAEATRLKRTARRRYTRRKNRICYLQEIFSNEMAKVDDSFFHRLEESFLVEEDKKHE | 338 |
| Streptococcus | RHPIFGNIVDEVAYHEKYPTIYHLRKKLVDSTDKADLRLIYLALAHMIKFRGHFLIE | |
| pyogenes | GDLNPDNSDVDKLFIQLVQTYNQLFEENPINASGVDAKAILSARLSKSRRLENLIAQ | |
| Q99ZW2 Cas9 | LPGEKKNGLFGNLIALSLGLTPNFKSNFDLAEDAKLQLSKDTYDDDLDNLLAQIGDQ | |
| with D10A | YADLFLAAKNLSDAILLSDILRVNTEITKAPLSASMIKRYDEHHQDLTLLKALVRQQ | |
| and H810A | LPEKYKEIFFDQSKNGYAGYIDGGASQEEFYKFIKPILEKMDGTEELLVKLNREDLL | |
| | RKQRTFDNGSIPHQIHLGELHAILRRQEDFYPFLKDNREKIEKILTFRIPYYVGPLA | |
| | RGNSRFAWMTRKSEETITPWNFEEVVDKGASAQSFIERMTNFDKNLPNEKVLPKHSL | |
| | LYEYFTVYNELTKVKYVTEGMRKPAFLSGEQKKAIVDLLFKTNRKVTVKQLKEDYFK | |
| | KIECFDSVEISGVEDRFNASLGTYHDLLKIIKDKDFLDNEENEDILEDIVLTLTLFE | |
| | DREMIEERLKTYAHLFDDKVMKQLKRRRYTGWGRLSRKLINGIRDKQSGKTILDFLK | |
| | SDGFANRNFMQLIHDDSLTFKEDIQKAQVSGQGDSLHEHIANLAGSPAIKKGILQTV | |
| | KVVDELVKVMGRHKPENIVIEMARENQTTQKGQKNSRERMKRIEEGIKELGSQILKE | |
| | HPVENTQLQNEKLYLYYLQNGRDMYVDQELDINRLSDYDVDAIVPQSFLKDDSIDNK | |
| | VLTRSDKNRGKSDNVPSEEVVKKMKNYWRQLLNAKLITQRKFDNLTKAERGGLSELD | |
| | KAGFIKRQLVETRQITKHVAQILDSRMNTKYDENDKLIREVKVITLKSKLVSDFRKD | |
| | FQFYKVREINNYHHAHDAYLNAVVGTALIKKYPKLESEFVYGDYKVYDVRKMIAKSE | |
| | QEIGKATAKYFFYSNIMNFFKTEITLANGEIRKRPLIETNGETGEIVWDKGRDFATV | |
| | RKVLSMPQVNIVKKTEVQTGGFSKESILPKRNSDKLIARKKDWDPKKYGGFDSPTVA | |
| | YSVLVVAKVEKGKSKKLKSVKELLGITIMERSSFEKNPIDFLEAKGYKEVKKDLIIK | |
| | LPKYSLFELENGRKRMLASAGELQKGNELALPSKYVNFLYLASHYEKLKGSPEDNEQ | |
| | KQLFVEQHKHYLDEIIEQISEFSKRVILADANLDKVLSAYNKHRDKPIREQAENIIH | |
| | LFTLTNLGAPAAFKYFDTTIDRKRYTSTKEVLDATLIHQSITGLYETRIDLSQLGGD | |

[0369] (d) Cas9 Nickase Variant

[0370] In one embodiment, the base editors described herein comprise a Cas9 nickase. The term “Cas9 nickase” of “nCas9” refers to a variant of Cas9 which is capable of introducing a single-strand break in a double strand DNA molecule target. In some embodiments, the Cas9 nickase comprises only a single functioning nuclease domain. The wild type Cas9 (e.g., the canonical SpCas9) comprises two separate nuclease domains, namely, the RuvC domain (which cleaves the non-protospacer DNA strand) and HNH domain (which cleaves the protospacer DNA strand). In one embodiment, the Cas9 nickase comprises a mutation in the RuvC domain which inactivates the RuvC nuclease activity. For example, mutations in aspartate (D) 10, histidine (H) 983, aspartate (D) 986, or glutamate (E) 762, have been reported as loss-of-function mutations of the RuvC nuclease domain and the creation of a functional Cas9 nickase (e.g., Nishimasu et al., “Crystal structure of Cas9 in complex with guide RNA and target DNA,” Cell 156(5), 935-949, which is incorporated herein by reference). Thus, nickase mutations in the RuvC domain could include D10X, H983X, D986X, or E762X, wherein X is any amino acid other than the wild type amino acid. In certain embodiments, the nickase could be D10A, of H983A, or D986A, or E762A, or a combination thereof.

[0371] In various embodiments, the Cas9 nickase can having a mutation in the RuvC nuclease domain and have one of the following amino acid sequences, or a variant thereof having an amino acid sequence that has at least 80%, at least 85%, at least 90%, at least 95%, or at least 99% sequence identity thereto.

| Description | Sequence | SEQ ID NO: |
|---|---|---|
| Cas9 nickase | MDKKYSIGLXIGTNSVGWAVITDEYKVPSKKFKVLGNTDRHSIKKNLIGALLFDSGE | SEQ ID NO: |
| Streptococcus | TAEATRLKRTARRRYTRRKNRICYLQEIFSNEMAKVDDSFFHRLEESFLVEEDKKHE | 339 |
| pyogenes | RHPIFGNIVDEVAYHEKYPTIYHLRKKLVDSTDKADLRLIYLALAHMIKFRGHFLIE | |
| Q99ZW2 Cas9 | GDLNPDNSDVDKLFIQLVQTYNQLFEENPINASGVDAKAILSARLSKSRRLENLIAQ | |
| with D10X, | LPGEKKNGLFGNLIALSLGLTPNFKSNFDLAEDAKLQLSKDTYDDDLDNLLAQIGDQ | |
| wherein X is | YADLFLAAKNLSDAILLSDILRVNTEITKAPLSASMIKRYDEHHQDLTLLKALVRQQ | |
| any | LPEKYKEIFFDQSKNGYAGYIDGGASQEEFYKFIKPILEKMDGTEELLVKLNREDLL | |
| alternate | RKQRTFDNGSIPHQIHLGELHAILRRQEDFYPFLKDNREKIEKILTFRIPYYVGPLA | |
| amino acid | RGNSRFAWMTRKSEETITPWNFEEVVDKGASAQSFIERMTNFDKNLPNEKVLPKHSL | |
| | LYEYFTVYNELTKVKYVTEGMRKPAFLSGEQKKAIVDLLFKTNRKVTVKQLKEDYFK | |
| | KIECFDSVEISGVEDRFNASLGTYHDLLKIIKDKDFLDNEENEDILEDIVLTLTLFE | |
| | DREMIEERLKTYAHLFDDKVMKQLKRRRYTGWGRLSRKLINGIRDKQSGKTILDFLK | |
| | SDGFANRNFMQLIHDDSLTFKEDIQKAQVSGQGDSLHEHIANLAGSPAIKKGILQTV | |
| | KVVDELVKVMGRHKPENIVIEMARENQTTQKGQKNSRERMKRIEEGIKELGSQILKE | |
| | HPVENTQLQNEKLYLYYLQNGRDMYVDQELDINRLSDYDVDHIVPQSFLKDDSIDNK | |
| | VLTRSDKNRGKSDNVPSEEVVKKMKNYWRQLLNAKLITQRKFDNLTKAERGGLSELD | |
| | KAGFIKRQLVETRQITKHVAQILDSRMNTKYDENDKLIREVKVITLKSKLVSDFRKD | |
| | FQFYKVREINNYHHAHDAYLNAVVGTALIKKYPKLESEFVYGDYKVYDVRKMIAKSE | |
| | QEIGKATAKYFFYSNIMNFFKTEITLANGEIRKRPLIETNGETGEIVWDKGRDFATV | |
| | RKVLSMPQVNIVKKTEVQTGGFSKESILPKRNSDKLIARKKDWDPKKYGGFDSPTVA | |
| | YSVLVVAKVEKGKSKKLKSVKELLGITIMERSSFEKNPIDFLEAKGYKEVKKDLIIK | |
| | LPKYSLFELENGRKRMLASAGELQKGNELALPSKYVNFLYLASHYEKLKGSPEDNEQ | |
| | KQLFVEQHKHYLDEIIEQISEFSKRVILADANLDKVLSAYNKHRDKPIREQAENIIH | |
| | LFTLTNLGAPAAFKYFDTTIDRKRYTSTKEVLDATLIHQSITGLYETRIDLSQLGGD | |
| Cas9 nickase | MDKKYSIGLDIGTNSVGWAVITDEYKVPSKKFKVLGNTDRHSIKKNLIGALLFDSGE | SEQ ID NO: |
| Streptococcus | TAEATRLKRTARRRYTRRKNRICYLQEIFSNEMAKVDDSFFHRLEESFLVEEDKKHE | 340 |
| pyogenes | RHPIFGNIVDEVAYHEKYPTIYHLRKKLVDSTDKADLRLIYLALAHMIKFRGHFLIE | |
| Q99ZW2 Cas9 | GDLNPDNSDVDKLFIQLVQTYNQLFEENPINASGVDAKAILSARLSKSRRLENLIAQ | |
| with E762X, | LPGEKKNGLFGNLIALSLGLTPNFKSNFDLAEDAKLQLSKDTYDDDLDNLLAQIGDQ | |
| wherein X is | YADLFLAAKNLSDAILLSDILRVNTEITKAPLSASMIKRYDEHHQDLTLLKALVRQQ | |
| any | LPEKYKEIFFDQSKNGYAGYIDGGASQEEFYKFIKPILEKMDGTEELLVKLNREDLL | |
| alternate | RKQRTFDNGSIPHQIHLGELHAILRRQEDFYPFLKDNREKIEKILTFRIPYYVGPLA | |
| amino acid | RGNSRFAWMTRKSEETITPWNFEEVVDKGASAQSFIERMTNFDKNLPNEKVLPKHSL | |
| | LYEYFTVYNELTKVKYVTEGMRKPAFLSGEQKKAIVDLLFKTNRKVTVKQLKEDYFK | |
| | KIECFDSVEISGVEDRFNASLGTYHDLLKIIKDKDFLDNEENEDILEDIVLTLTLFE | |
| | DREMIEERLKTYAHLFDDKVMKQLKRRRYTGWGRLSRKLINGIRDKQSGKTILDFLK | |
| | SDGFANRNFMQLIHDDSLTFKEDIQKAQVSGQGDSLHEHIANLAGSPAIKKGILQTV | |
| | KVVDELVKVMGRHKPENIVIXMARENQTTQKGQKNSRERMKRIEEGIKELGSQILKE | |
| | HPVENTQLQNEKLYLYYLQNGRDMYVDQELDINRLSDYDVDHIVPQSFLKDDSIDNK | |
| | VLTRSDKNRGKSDNVPSEEVVKKMKNYWRQLLNAKLITQRKFDNLTKAERGGLSELD | |
| | KAGFIKRQLVETRQITKHVAQILDSRMNTKYDENDKLIREVKVITLKSKLVSDFRKD | |
| | FQFYKVREINNYHHAHDAYLNAVVGTALIKKYPKLESEFVYGDYKVYDVRKMIAKSE | |
| | QEIGKATAKYFFYSNIMNFFKTEITLANGEIRKRPLIETNGETGEIVWDKGRDFATV | |
| | RKVLSMPQVNIVKKTEVQTGGFSKESILPKRNSDKLIARKKDWDPKKYGGFDSPTVA | |
| | YSVLVVAKVEKGKSKKLKSVKELLGITIMERSSFEKNPIDFLEAKGYKEVKKDLIIK | |
| | LPKYSLFELENGRKRMLASAGELQKGNELALPSKYVNFLYLASHYEKLKGSPEDNEQ | |
| | KQLFVEQHKHYLDEIIEQISEFSKRVILADANLDKVLSAYNKHRDKPIREQAENIIH | |
| | LFTLTNLGAPAAFKYFDTTIDRKRYTSTKEVLDATLIHQSITGLYETRIDLSQLGGD | |
| Cas9 nickase | MDKKYSIGLDIGTNSVGWAVITDEYKVPSKKFKVLGNTDRHSIKKNLIGALLFDSGE | SEQ ID NO: |
| Streptococcus | TAEATRLKRTARRRYTRRKNRICYLQEIFSNEMAKVDDSFFHRLEESFLVEEDKKHE | 341 |
| pyogenes | RHPIFGNIVDEVAYHEKYPTIYHLRKKLVDSTDKADLRLIYLALAHMIKFRGHFLIE | |
| Q99ZW2 Cas9 | GDLNPDNSDVDKLFIQLVQTYNQLFEENPINASGVDAKAILSARLSKSRRLENLIAQ | |
| with H983X, | LPGEKKNGLFGNLIALSLGLTPNFKSNFDLAEDAKLQLSKDTYDDDLDNLLAQIGDQ | |
| wherein X is | YADLFLAAKNLSDAILLSDILRVNTEITKAPLSASMIKRYDEHHQDLTLLKALVRQQ | |
| any | LPEKYKEIFFDQSKNGYAGYIDGGASQEEFYKFIKPILEKMDGTEELLVKLNREDLL | |
| alternate | RKQRTFDNGSIPHQIHLGELHAILRRQEDFYPFLKDNREKIEKILTFRIPYYVGPLA | |
| amino acid | RGNSRFAWMTRKSEETITPWNFEEVVDKGASAQSFIERMTNFDKNLPNEKVLPKHSL | |
| | LYEYFTVYNELTKVKYVTEGMRKPAFLSGEQKKAIVDLLFKTNRKVTVKQLKEDYFK | |
| | KIECFDSVEISGVEDRFNASLGTYHDLLKIIKDKDFLDNEENEDILEDIVLTLTLFE | |
| | DREMIEERLKTYAHLFDDKVMKQLKRRRYTGWGRLSRKLINGIRDKQSGKTILDFLK | |
| | SDGFANRNFMQLIHDDSLTFKEDIQKAQVSGQGDSLHEHIANLAGSPAIKKGILQTV | |
| | KVVDELVKVMGRHKPENIVIEMARENQTTQKGQKNSRERMKRIEEGIKELGSQILKE | |
| | HPVENTQLQNEKLYLYYLQNGRDMYVDQELDINRLSDYDVDHIVPQSFLKDDSIDNK | |
| | VLTRSDKNRGKSDNVPSEEVVKKMKNYWRQLLNAKLITQRKFDNLTKAERGGLSELD | |
| | KAGFIKRQLVETRQITKHVAQILDSRMNTKYDENDKLIREVKVITLKSKLVSDFRKD | |
| | FQFYKVREINNYHXAHDAYLNAVVGTALIKKYPKLESEFVYGDYKVYDVRKMIAKSE | |
| | QEIGKATAKYFFYSNIMNFFKTEITLANGEIRKRPLIETNGETGEIVWDKGRDFATV | |
| | RKVLSMPQVNIVKKTEVQTGGFSKESILPKRNSDKLIARKKDWDPKKYGGFDSPTVA | |
| | YSVLVVAKVEKGKSKKLKSVKELLGITIMERSSFEKNPIDFLEAKGYKEVKKDLIIK | |
| | LPKYSLFELENGRKRMLASAGELQKGNELALPSKYVNFLYLASHYEKLKGSPEDNEQ | |
| | KQLFVEQHKHYLDEIIEQISEFSKRVILADANLDKVLSAYNKHRDKPIREQAENIIH | |
| | LFTLTNLGAPAAFKYFDTTIDRKRYTSTKEVLDATLIHQSITGLYETRIDLSQLGGD | |
| Cas9 nickase | MDKKYSIGLDIGTNSVGWAVITDEYKVPSKKFKVLGNTDRHSIKKNLIGALLFDSGE | SEQ ID NO: |
| Streptococcus | TAEATRLKRTARRRYTRRKNRICYLQEIFSNEMAKVDDSFFHRLEESFLVEEDKKHE | 342 |
| pyogenes | RHPIFGNIVDEVAYHEKYPTIYHLRKKLVDSTDKADLRLIYLALAHMIKFRGHFLIE | |
| Q99ZW2 Cas9 | GDLNPDNSDVDKLFIQLVQTYNQLFEENPINASGVDAKAILSARLSKSRRLENLIAQ | |
| with D986X, | LPGEKKNGLFGNLIALSLGLTPNFKSNFDLAEDAKLQLSKDTYDDDLDNLLAQIGDQ | |
| wherein X is | YADLFLAAKNLSDAILLSDILRVNTEITKAPLSASMIKRYDEHHQDLTLLKALVRQQ | |
| any | LPEKYKEIFFDQSKNGYAGYIDGGASQEEFYKFIKPILEKMDGTEELLVKLNREDLL | |
| alternate | RKQRTFDNGSIPHQIHLGELHAILRRQEDFYPFLKDNREKIEKILTFRIPYYVGPLA | |
| amino acid | RGNSRFAWMTRKSEETITPWNFEEVVDKGASAQSFIERMTNFDKNLPNEKVLPKHSL | |
| | LYEYFTVYNELTKVKYVTEGMRKPAFLSGEQKKAIVDLLFKTNRKVTVKQLKEDYFK | |
| | KIECFDSVEISGVEDRFNASLGTYHDLLKIIKDKDFLDNEENEDILEDIVLTLTLFE | |
| | DREMIEERLKTYAHLFDDKVMKQLKRRRYTGWGRLSRKLINGIRDKQSGKTILDFLK | |
| | SDGFANRNFMQLIHDDSLTFKEDIQKAQVSGQGDSLHEHIANLAGSPAIKKGILQTV | |
| | KVVDELVKVMGRHKPENIVIEMARENQTTQKGQKNSRERMKRIEEGIKELGSQILKE | |
| | HPVENTQLQNEKLYLYYLQNGRDMYVDQELDINRLSDYDVDHIVPQSFLKDDSIDNK | |
| | VLTRSDKNRGKSDNVPSEEVVKKMKNYWRQLLNAKLITQRKFDNLTKAERGGLSELD | |
| | KAGFIKRQLVETRQITKHVAQILDSRMNTKYDENDKLIREVKVITLKSKLVSDFRKD | |
| | FQFYKVREINNYHHAHXAYLNAVVGTALIKKYPKLESEFVYGDYKVYDVRKMIAKSE | |
| | QEIGKATAKYFFYSNIMNFFKTEITLANGEIRKRPLIETNGETGEIVWDKGRDFATV | |
| | RKVLSMPQVNIVKKTEVQTGGFSKESILPKRNSDKLIARKKDWDPKKYGGFDSPTVA | |
| | YSVLVVAKVEKGKSKKLKSVKELLGITIMERSSFEKNPIDFLEAKGYKEVKKDLIIK | |
| | LPKYSLFELENGRKRMLASAGELQKGNELALPSKYVNFLYLASHYEKLKGSPEDNEQ | |
| | KQLFVEQHKHYLDEIIEQISEFSKRVILADANLDKVLSAYNKHRDKPIREQAENIIH | |
| | LFTLTNLGAPAAFKYFDTTIDRKRYTSTKEVLDATLIHQSITGLYETRIDLSQLGGD | |
| Cas9 nickase | MDKKYSIGLAIGTNSVGWAVITDEYKVPSKKFKVLGNTDRHSIKKNLIGALLFDSGE | SEQ ID NO: |
| Streptococcus | TAEATRLKRTARRRYTRRKNRICYLQEIFSNEMAKVDDSFFHRLEESFLVEEDKKHE | 343 |
| pyogenes | RHPIFGNIVDEVAYHEKYPTIYHLRKKLVDSTDKADLRLIYLALAHMIKFRGHFLIE | |
| Q99ZW2 Cas9 | GDLNPDNSDVDKLFIQLVQTYNQLFEENPINASGVDAKAILSARLSKSRRLENLIAQ | |
| with D10A | LPGEKKNGLFGNLIALSLGLTPNFKSNFDLAEDAKLQLSKDTYDDDLDNLLAQIGDQ | |
| | YADLFLAAKNLSDAILLSDILRVNTEITKAPLSASMIKRYDEHHQDLTLLKALVRQQ | |
| | LPEKYKEIFFDQSKNGYAGYIDGGASQEEFYKFIKPILEKMDGTEELLVKLNREDLL | |
| | RKQRTFDNGSIPHQIHLGELHAILRRQEDFYPFLKDNREKIEKILTFRIPYYVGPLA | |
| | RGNSRFAWMTRKSEETITPWNFEEVVDKGASAQSFIERMTNFDKNLPNEKVLPKHSL | |
| | LYEYFTVYNELTKVKYVTEGMRKPAFLSGEQKKAIVDLLFKTNRKVTVKQLKEDYFK | |
| | KIECFDSVEISGVEDRFNASLGTYHDLLKIIKDKDFLDNEENEDILEDIVLTLTLFE | |
| | DREMIEERLKTYAHLFDDKVMKQLKRRRYTGWGRLSRKLINGIRDKQSGKTILDFLK | |
| | SDGFANRNFMQLIHDDSLTFKEDIQKAQVSGQGDSLHEHIANLAGSPAIKKGILQTV | |
| | KVVDELVKVMGRHKPENIVIEMARENQTTQKGQKNSRERMKRIEEGIKELGSQILKE | |
| | HPVENTQLQNEKLYLYYLQNGRDMYVDQELDINRLSDYDVDHIVPQSFLKDDSIDNK | |
| | VLTRSDKNRGKSDNVPSEEVVKKMKNYWRQLLNAKLITQRKFDNLTKAERGGLSELD | |
| | KAGFIKRQLVETRQITKHVAQILDSRMNTKYDENDKLIREVKVITLKSKLVSDFRKD | |
| | FQFYKVREINNYHHAHDAYLNAVVGTALIKKYPKLESEFVYGDYKVYDVRKMIAKSE | |
| | QEIGKATAKYFFYSNIMNFFKTEITLANGEIRKRPLIETNGETGEIVWDKGRDFATV | |
| | RKVLSMPQVNIVKKTEVQTGGFSKESILPKRNSDKLIARKKDWDPKKYGGFDSPTVA | |
| | YSVLVVAKVEKGKSKKLKSVKELLGITIMERSSFEKNPIDFLEAKGYKEVKKDLIIK | |
| | LPKYSLFELENGRKRMLASAGELQKGNELALPSKYVNFLYLASHYEKLKGSPEDNEQ | |
| | KQLFVEQHKHYLDEIIEQISEFSKRVILADANLDKVLSAYNKHRDKPIREQAENIIH | |
| | LFTLTNLGAPAAFKYFDTTIDRKRYTSTKEVLDATLIHQSITGLYETRIDLSQLGGD | |
| Cas9 nickase | MDKKYSIGLDIGTNSVGWAVITDEYKVPSKKFKVLGNTDRHSIKKNLIGALLFDSGE | SEQ ID NO: |
| Streptococcus | TAEATRLKRTARRRYTRRKNRICYLQEIFSNEMAKVDDSFFHRLEESFLVEEDKKHE | 344 |
| pyogenes | RHPIFGNIVDEVAYHEKYPTIYHLRKKLVDSTDKADLRLIYLALAHMIKFRGHFLIE | |
| Q99ZW2 Cas9 | GDLNPDNSDVDKLFIQLVQTYNQLFEENPINASGVDAKAILSARLSKSRRLENLIAQ | |
| with E762A | LPGEKKNGLFGNLIALSLGLTPNFKSNFDLAEDAKLQLSKDTYDDDLDNLLAQIGDQ | |
| | YADLFLAAKNLSDAILLSDILRVNTEITKAPLSASMIKRYDEHHQDLTLLKALVRQQ | |
| | LPEKYKEIFFDQSKNGYAGYIDGGASQEEFYKFIKPILEKMDGTEELLVKLNREDLL | |
| | RKQRTFDNGSIPHQIHLGELHAILRRQEDFYPFLKDNREKIEKILTFRIPYYVGPLA | |
| | RGNSRFAWMTRKSEETITPWNFEEVVDKGASAQSFIERMTNFDKNLPNEKVLPKHSL | |
| | LYEYFTVYNELTKVKYVTEGMRKPAFLSGEQKKAIVDLLFKTNRKVTVKQLKEDYFK | |
| | KIECFDSVEISGVEDRFNASLGTYHDLLKIIKDKDFLDNEENEDILEDIVLTLTLFE | |
| | DREMIEERLKTYAHLFDDKVMKQLKRRRYTGWGRLSRKLINGIRDKQSGKTILDFLK | |
| | SDGFANRNFMQLIHDDSLTFKEDIQKAQVSGQGDSLHEHIANLAGSPAIKKGILQTV | |
| | KVVDELVKVMGRHKPENIVIAMARENQTTQKGQKNSRERMKRIEEGIKELGSQILKE | |
| | HPVENTQLQNEKLYLYYLQNGRDMYVDQELDINRLSDYDVDHIVPQSFLKDDSIDNK | |
| | VLTRSDKNRGKSDNVPSEEVVKKMKNYWRQLLNAKLITQRKFDNLTKAERGGLSELD | |
| | KAGFIKRQLVETRQITKHVAQILDSRMNTKYDENDKLIREVKVITLKSKLVSDFRKD | |
| | FQFYKVREINNYHHAHDAYLNAVVGTALIKKYPKLESEFVYGDYKVYDVRKMIAKSE | |
| | QEIGKATAKYFFYSNIMNFFKTEITLANGEIRKRPLIETNGETGEIVWDKGRDFATV | |
| | RKVLSMPQVNIVKKTEVQTGGFSKESILPKRNSDKLIARKKDWDPKKYGGFDSPTVA | |
| | YSVLVVAKVEKGKSKKLKSVKELLGITIMERSSFEKNPIDFLEAKGYKEVKKDLIIK | |
| | LPKYSLFELENGRKRMLASAGELQKGNELALPSKYVNFLYLASHYEKLKGSPEDNEQ | |
| | KQLFVEQHKHYLDEIIEQISEFSKRVILADANLDKVLSAYNKHRDKPIREQAENIIH | |
| | LFTLTNLGAPAAFKYFDTTIDRKRYTSTKEVLDATLIHQSITGLYETRIDLSQLGGD | |
| Cas9 nickase | MDKKYSIGLDIGTNSVGWAVITDEYKVPSKKFKVLGNTDRHSIKKNLIGALLFDSGE | SEQ ID NO: |
| Streptococcus | TAEATRLKRTARRRYTRRKNRICYLQEIFSNEMAKVDDSFFHRLEESFLVEEDKKHE | 345 |
| pyogenes | RHPIFGNIVDEVAYHEKYPTIYHLRKKLVDSTDKADLRLIYLALAHMIKFRGHFLIE | |
| Q99ZW2 Cas9 | GDLNPDNSDVDKLFIQLVQTYNQLFEENPINASGVDAKAILSARLSKSRRLENLIAQ | |
| with H983A | LPGEKKNGLFGNLIALSLGLTPNFKSNFDLAEDAKLQLSKDTYDDDLDNLLAQIGDQ | |
| | YADLFLAAKNLSDAILLSDILRVNTEITKAPLSASMIKRYDEHHQDLTLLKALVRQQ | |
| | LPEKYKEIFFDQSKNGYAGYIDGGASQEEFYKFIKPILEKMDGTEELLVKLNREDLL | |
| | RKQRTFDNGSIPHQIHLGELHAILRRQEDFYPFLKDNREKIEKILTFRIPYYVGPLA | |
| | RGNSRFAWMTRKSEETITPWNFEEVVDKGASAQSFIERMTNFDKNLPNEKVLPKHSL | |
| | LYEYFTVYNELTKVKYVTEGMRKPAFLSGEQKKAIVDLLFKTNRKVTVKQLKEDYFK | |
| | KIECFDSVEISGVEDRFNASLGTYHDLLKIIKDKDFLDNEENEDILEDIVLTLTLFE | |
| | DREMIEERLKTYAHLFDDKVMKQLKRRRYTGWGRLSRKLINGIRDKQSGKTILDFLK | |
| | SDGFANRNFMQLIHDDSLTFKEDIQKAQVSGQGDSLHEHIANLAGSPAIKKGILQTV | |
| | KVVDELVKVMGRHKPENIVIEMARENQTTQKGQKNSRERMKRIEEGIKELGSQILKE | |
| | HPVENTQLQNEKLYLYYLQNGRDMYVDQELDINRLSDYDVDHIVPQSFLKDDSIDNK | |
| | VLTRSDKNRGKSDNVPSEEVVKKMKNYWRQLLNAKLITQRKFDNLTKAERGGLSELD | |
| | KAGFIKRQLVETRQITKHVAQILDSRMNTKYDENDKLIREVKVITLKSKLVSDFRKD | |
| | FQFYKVREINNYHAAHDAYLNAVVGTALIKKYPKLESEFVYGDYKVYDVRKMIAKSE | |
| | QEIGKATAKYFFYSNIMNFFKTEITLANGEIRKRPLIETNGETGEIVWDKGRDFATV | |
| | RKVLSMPQVNIVKKTEVQTGGFSKESILPKRNSDKLIARKKDWDPKKYGGFDSPTVA | |
| | YSVLVVAKVEKGKSKKLKSVKELLGITIMERSSFEKNPIDFLEAKGYKEVKKDLIIK | |
| | LPKYSLFELENGRKRMLASAGELQKGNELALPSKYVNFLYLASHYEKLKGSPEDNEQ | |
| | KQLFVEQHKHYLDEIIEQISEFSKRVILADANLDKVLSAYNKHRDKPIREQAENIIH | |
| | LFTLTNLGAPAAFKYFDTTIDRKRYTSTKEVLDATLIHQSITGLYETRIDLSQLGGD | |
| Cas9 nickase | MDKKYSIGLDIGTNSVGWAVITDEYKVPSKKFKVLGNTDRHSIKKNLIGALLFDSGE | SEQ ID NO: |
| Streptococcus | TAEATRLKRTARRRYTRRKNRICYLQEIFSNEMAKVDDSFFHRLEESFLVEEDKKHE | 346 |
| pyogenes | RHPIFGNIVDEVAYHEKYPTIYHLRKKLVDSTDKADLRLIYLALAHMIKFRGHFLIE | |
| Q99ZW Cas9 | GDLNPDNSDVDKLFIQLVQTYNQLFEENPINASGVDAKAILSARLSKSRRLENLIAQ | |
| with D986A | LPGEKKNGLFGNLIALSLGLTPNFKSNFDLAEDAKLQLSKDTYDDDLDNLLAQIGDQ | |
| | YADLFLAAKNLSDAILLSDILRVNTEITKAPLSASMIKRYDEHHQDLTLLKALVRQQ | |
| | LPEKYKEIFFDQSKNGYAGYIDGGASQEEFYKFIKPILEKMDGTEELLVKLNREDLL | |
| | RKQRTFDNGSIPHQIHLGELHAILRRQEDFYPFLKDNREKIEKILTFRIPYYVGPLA | |
| | RGNSRFAWMTRKSEETITPWNFEEVVDKGASAQSFIERMTNFDKNLPNEKVLPKHSL | |
| | LYEYFTVYNELTKVKYVTEGMRKPAFLSGEQKKAIVDLLFKTNRKVTVKQLKEDYFK | |
| | KIECFDSVEISGVEDRFNASLGTYHDLLKIIKDKDFLDNEENEDILEDIVLTLTLFE | |
| | DREMIEERLKTYAHLFDDKVMKQLKRRRYTGWGRLSRKLINGIRDKQSGKTILDFLK | |
| | SDGFANRNFMQLIHDDSLTFKEDIQKAQVSGQGDSLHEHIANLAGSPAIKKGILQTV | |
| | KVVDELVKVMGRHKPENIVIEMARENQTTQKGQKNSRERMKRIEEGIKELGSQILKE | |
| | HPVENTQLQNEKLYLYYLQNGRDMYVDQELDINRLSDYDVDHIVPQSFLKDDSIDNK | |
| | VLTRSDKNRGKSDNVPSEEVVKKMKNYWRQLLNAKLITQRKFDNLTKAERGGLSELD | |
| | KAGFIKRQLVETRQITKHVAQILDSRMNTKYDENDKLIREVKVITLKSKLVSDFRKD | |
| | FQFYKVREINNYHHAHAAYLNAVVGTALIKKYPKLESEFVYGDYKVYDVRKMIAKSE | |
| | QEIGKATAKYFFYSNIMNFFKTEITLANGEIRKRPLIETNGETGEIVWDKGRDFATV | |
| | RKVLSMPQVNIVKKTEVQTGGFSKESILPKRNSDKLIARKKDWDPKKYGGFDSPTVA | |
| | YSVLVVAKVEKGKSKKLKSVKELLGITIMERSSFEKNPIDFLEAKGYKEVKKDLIIK | |
| | LPKYSLFELENGRKRMLASAGELQKGNELALPSKYVNFLYLASHYEKLKGSPEDNEQ | |
| | KQLFVEQHKHYLDEIIEQISEFSKRVILADANLDKVLSAYNKHRDKPIREQAENIIH | |
| | LFTLTNLGAPAAFKYFDTTIDRKRYTSTKEVLDATLIHQSITGLYETRIDLSQLGGD | |

[0372] In another embodiment, the Cas9 nickase comprises a mutation in the HNH domain which inactivates the HNH nuclease activity. For example, mutations in histidine (H) 840 or asparagine (R) 863 have been reported as loss-of-function mutations of the HNH nuclease domain and the creation of a functional Cas9 nickase (e.g., Nishimasu et al., “Crystal structure of Cas9 in complex with guide RNA and target DNA,” Cell 156(5), 935-949, which is incorporated herein by reference). Thus, nickase mutations in the HNH domain could include H840X and R863X, wherein X is any amino acid other than the wild type amino acid. In certain embodiments, the nickase could be H840A or R863A or a combination thereof.

[0373] In various embodiments, the Cas9 nickase can have a mutation in the HNH nuclease domain and have one of the following amino acid sequences, or a variant thereof having an amino acid sequence that has at least 80%, at least 85%, at least 90%, at least 95%, or at least 99% sequence identity thereto.

| Description | Sequence | SEQ ID NO: |
|---|---|---|
| Cas9 nickase | MDKKYSIGLDIGTNSVGWAVITDEYKVPSKKFKVLGNTDRHSIKKNLIGALLFDSGE | SEQ ID NO: |
| Streptococcus | TAEATRLKRTARRRYTRRKNRICYLQEIFSNEMAKVDDSFFHRLEESFLVEEDKKHE | 347 |
| pyogenes | RHPIFGNIVDEVAYHEKYPTIYHLRKKLVDSTDKADLRLIYLALAHMIKFRGHFLIE | |
| Q99ZW2 Cas9 | GDLNPDNSDVDKLFIQLVQTYNQLFEENPINASGVDAKAILSARLSKSRRLENLIAQ | |
| with H840X, | LPGEKKNGLFGNLIALSLGLTPNFKSNFDLAEDAKLQLSKDTYDDDLDNLLAQIGDQ | |
| wherein X is | YADLFLAAKNLSDAILLSDILRVNTEITKAPLSASMIKRYDEHHQDLTLLKALVRQQ | |
| any | LPEKYKEIFFDQSKNGYAGYIDGGASQEEFYKFIKPILEKMDGTEELLVKLNREDLL | |
| alternate | RKQRTFDNGSIPHQIHLGELHAILRRQEDFYPFLKDNREKIEKILTFRIPYYVGPLA | |
| amino acid | RGNSRFAWMTRKSEETITPWNFEEVVDKGASAQSFIERMTNFDKNLPNEKVLPKHSL | |
| | LYEYFTVYNELTKVKYVTEGMRKPAFLSGEQKKAIVDLLFKTNRKVTVKQLKEDYFK | |
| | KIECFDSVEISGVEDRFNASLGTYHDLLKIIKDKDFLDNEENEDILEDIVLTLTLFE | |
| | DREMIEERLKTYAHLFDDKVMKQLKRRRYTGWGRLSRKLINGIRDKQSGKTILDFLK | |
| | SDGFANRNFMQLIHDDSLTFKEDIQKAQVSGQGDSLHEHIANLAGSPAIKKGILQTV | |
| | KVVDELVKVMGRHKPENIVIEMARENQTTQKGQKNSRERMKRIEEGIKELGSQILKE | |
| | HPVENTQLQNEKLYLYYLQNGRDMYVDQELDINRLSDYDVDXIVPQSFLKDDSIDNK | |
| | VLTRSDKNRGKSDNVPSEEVVKKMKNYWRQLLNAKLITQRKFDNLTKAERGGLSELD | |
| | KAGFIKRQLVETRQITKHVAQILDSRMNTKYDENDKLIREVKVITLKSKLVSDFRKD | |
| | FQFYKVREINNYHHAHDAYLNAVVGTALIKKYPKLESEFVYGDYKVYDVRKMIAKSE | |
| | QEIGKATAKYFFYSNIMNFFKTEITLANGEIRKRPLIETNGETGEIVWDKGRDFATV | |
| | RKVLSMPQVNIVKKTEVQTGGFSKESILPKRNSDKLIARKKDWDPKKYGGFDSPTVA | |
| | YSVLVVAKVEKGKSKKLKSVKELLGITIMERSSFEKNPIDFLEAKGYKEVKKDLIIK | |
| | LPKYSLFELENGRKRMLASAGELQKGNELALPSKYVNFLYLASHYEKLKGSPEDNEQ | |
| | KQLFVEQHKHYLDEIIEQISEFSKRVILADANLDKVLSAYNKHRDKPIREQAENIIH | |
| | LFTLTNLGAPAAFKYFDTTIDRKRYTSTKEVLDATLIHQSITGLYETRIDLSQLGGD | |
| Cas9 nickase | MDKKYSIGLDIGTNSVGWAVITDEYKVPSKKFKVLGNTDRHSIKKNLIGALLFDSGE | SEQ ID NO: |
| Streptococcus | TAEATRLKRTARRRYTRRKNRICYLQEIFSNEMAKVDDSFFHRLEESFLVEEDKKHE | 348 |
| pyogenes | RHPIFGNIVDEVAYHEKYPTIYHLRKKLVDSTDKADLRLIYLALAHMIKFRGHFLIE | |
| Q99ZW2 Cas9 | GDLNPDNSDVDKLFIQLVQTYNQLFEENPINASGVDAKAILSARLSKSRRLENLIAQ | |
| with H840A, | LPGEKKNGLFGNLIALSLGLTPNFKSNFDLAEDAKLQLSKDTYDDDLDNLLAQIGDQ | |
| wherein X is | YADLFLAAKNLSDAILLSDILRVNTEITKAPLSASMIKRYDEHHQDLTLLKALVRQQ | |
| any | LPEKYKEIFFDQSKNGYAGYIDGGASQEEFYKFIKPILEKMDGTEELLVKLNREDLL | |
| alternate | RKQRTFDNGSIPHQIHLGELHAILRRQEDFYPFLKDNREKIEKILTFRIPYYVGPLA | |
| amino acid | RGNSRFAWMTRKSEETITPWNFEEVVDKGASAQSFIERMTNFDKNLPNEKVLPKHSL | |
| | LYEYFTVYNELTKVKYVTEGMRKPAFLSGEQKKAIVDLLFKTNRKVTVKQLKEDYFK | |
| | KIECFDSVEISGVEDRFNASLGTYHDLLKIIKDKDFLDNEENEDILEDIVLTLTLFE | |
| | DREMIEERLKTYAHLFDDKVMKQLKRRRYTGWGRLSRKLINGIRDKQSGKTILDFLK | |
| | SDGFANRNFMQLIHDDSLTFKEDIQKAQVSGQGDSLHEHIANLAGSPAIKKGILQTV | |
| | KVVDELVKVMGRHKPENIVIEMARENQTTQKGQKNSRERMKRIEEGIKELGSQILKE | |
| | HPVENTQLQNEKLYLYYLQNGRDMYVDQELDINRLSDYDVDAIVPQSFLKDDSIDNK | |
| | VLTRSDKNRGKSDNVPSEEVVKKMKNYWRQLLNAKLITQRKFDNLTKAERGGLSELD | |
| | KAGFIKRQLVETRQITKHVAQILDSRMNTKYDENDKLIREVKVITLKSKLVSDFRKD | |
| | FQFYKVREINNYHHAHDAYLNAVVGTALIKKYPKLESEFVYGDYKVYDVRKMIAKSE | |
| | QEIGKATAKYFFYSNIMNFFKTEITLANGEIRKRPLIETNGETGEIVWDKGRDFATV | |
| | RKVLSMPQVNIVKKTEVQTGGFSKESILPKRNSDKLIARKKDWDPKKYGGFDSPTVA | |
| | YSVLVVAKVEKGKSKKLKSVKELLGITIMERSSFEKNPIDFLEAKGYKEVKKDLIIK | |
| | LPKYSLFELENGRKRMLASAGELQKGNELALPSKYVNFLYLASHYEKLKGSPEDNEQ | |
| | KQLFVEQHKHYLDEIIEQISEFSKRVILADANLDKVLSAYNKHRDKPIREQAENIIH | |
| | LFTLTNLGAPAAFKYFDTTIDRKRYTSTKEVLDATLIHQSITGLYETRIDLSQLGGD | |
| Cas9 nickase | MDKKYSIGLDIGTNSVGWAVITDEYKVPSKKFKVLGNTDRHSIKKNLIGALLFDSGE | SEQ ID NO: |
| Streptococcus | TAEATRLKRTARRRYTRRKNRICYLQEIFSNEMAKVDDSFFHRLEESFLVEEDKKHE | 349 |
| pyogenes | RHPIFGNIVDEVAYHEKYPTIYHLRKKLVDSTDKADLRLIYLALAHMIKFRGHFLIE | |
| Q99ZW2 Cas9 | GDLNPDNSDVDKLFIQLVQTYNQLFEENPINASGVDAKAILSARLSKSRRLENLIAQ | |
| with R863X, | LPGEKKNGLFGNLIALSLGLTPNFKSNFDLAEDAKLQLSKDTYDDDLDNLLAQIGDQ | |
| wherein X is | YADLFLAAKNLSDAILLSDILRVNTEITKAPLSASMIKRYDEHHQDLTLLKALVRQQ | |
| any | LPEKYKEIFFDQSKNGYAGYIDGGASQEEFYKFIKPILEKMDGTEELLVKLNREDLL | |
| alternate | RKQRTFDNGSIPHQIHLGELHAILRRQEDFYPFLKDNREKIEKILTFRIPYYVGPLA | |
| amino acid | RGNSRFAWMTRKSEETITPWNFEEVVDKGASAQSFIERMTNFDKNLPNEKVLPKHSL | |
| | LYEYFTVYNELTKVKYVTEGMRKPAFLSGEQKKAIVDLLFKTNRKVTVKQLKEDYFK | |
| | KIECFDSVEISGVEDRFNASLGTYHDLLKIIKDKDFLDNEENEDILEDIVLTLTLFE | |
| | DREMIEERLKTYAHLFDDKVMKQLKRRRYTGWGRLSRKLINGIRDKQSGKTILDFLK | |
| | SDGFANRNFMQLIHDDSLTFKEDIQKAQVSGQGDSLHEHIANLAGSPAIKKGILQTV | |
| | KVVDELVKVMGRHKPENIVIEMARENQTTQKGQKNSRERMKRIEEGIKELGSQILKE | |
| | HPVENTQLQNEKLYLYYLQNGRDMYVDQELDINRLSDYDVDHIVPQSFLKDDSIDNK | |
| | VLTRSDKNXGKSDNVPSEEVVKKMKNYWRQLLNAKLITQRKFDNLTKAERGGLSELD | |
| | KAGFIKRQLVETRQITKHVAQILDSRMNTKYDENDKLIREVKVITLKSKLVSDFRKD | |
| | FQFYKVREINNYHHAHDAYLNAVVGTALIKKYPKLESEFVYGDYKVYDVRKMIAKSE | |
| | QEIGKATAKYFFYSNIMNFFKTEITLANGEIRKRPLIETNGETGEIVWDKGRDFATV | |
| | RKVLSMPQVNIVKKTEVQTGGFSKESILPKRNSDKLIARKKDWDPKKYGGFDSPTVA | |
| | YSVLVVAKVEKGKSKKLKSVKELLGITIMERSSFEKNPIDFLEAKGYKEVKKDLIIK | |
| | LPKYSLFELENGRKRMLASAGELQKGNELALPSKYVNFLYLASHYEKLKGSPEDNEQ | |
| | KQLFVEQHKHYLDEIIEQISEFSKRVILADANLDKVLSAYNKHRDKPIREQAENIIH | |
| | LFTLTNLGAPAAFKYFDTTIDRKRYTSTKEVLDATLIHQSITGLYETRIDLSQLGGD | |
| Cas9 nickase | MDKKYSIGLDIGTNSVGWAVITDEYKVPSKKFKVLGNTDRHSIKKNLIGALLFDSGE | SEQ ID NO: |
| Streptococcus | TAEATRLKRTARRRYTRRKNRICYLQEIFSNEMAKVDDSFFHRLEESFLVEEDKKHE | 350 |
| pyogenes | RHPIFGNIVDEVAYHEKYPTIYHLRKKLVDSTDKADLRLIYLALAHMIKFRGHFLIE | |
| Q99ZW2 Cas9 | GDLNPDNSDVDKLFIQLVQTYNQLFEENPINASGVDAKAILSARLSKSRRLENLIAQ | |
| with R863A, | LPGEKKNGLFGNLIALSLGLTPNFKSNFDLAEDAKLQLSKDTYDDDLDNLLAQIGDQ | |
| wherein X is | YADLFLAAKNLSDAILLSDILRVNTEITKAPLSASMIKRYDEHHQDLTLLKALVRQQ | |
| any | LPEKYKEIFFDQSKNGYAGYIDGGASQEEFYKFIKPILEKMDGTEELLVKLNREDLL | |
| alternate | RKQRTFDNGSIPHQIHLGELHAILRRQEDFYPFLKDNREKIEKILTFRIPYYVGPLA | |
| amino acid | RGNSRFAWMTRKSEETITPWNFEEVVDKGASAQSFIERMTNFDKNLPNEKVLPKHSL | |
| | LYEYFTVYNELTKVKYVTEGMRKPAFLSGEQKKAIVDLLFKTNRKVTVKQLKEDYFK | |
| | KIECFDSVEISGVEDRFNASLGTYHDLLKIIKDKDFLDNEENEDILEDIVLTLTLFE | |
| | DREMIEERLKTYAHLFDDKVMKQLKRRRYTGWGRLSRKLINGIRDKQSGKTILDFLK | |
| | SDGFANRNFMQLIHDDSLTFKEDIQKAQVSGQGDSLHEHIANLAGSPAIKKGILQTV | |
| | KVVDELVKVMGRHKPENIVIEMARENQTTQKGQKNSRERMKRIEEGIKELGSQILKE | |
| | HPVENTQLQNEKLYLYYLQNGRDMYVDQELDINRLSDYDVDHIVPQSFLKDDSIDNK | |
| | VLTRSDKNAGKSDNVPSEEVVKKMKNYWRQLLNAKLITQRKFDNLTKAERGGLSELD | |
| | KAGFIKRQLVETRQITKHVAQILDSRMNTKYDENDKLIREVKVITLKSKLVSDFRKD | |
| | FQFYKVREINNYHHAHDAYLNAVVGTALIKKYPKLESEFVYGDYKVYDVRKMIAKSE | |
| | QEIGKATAKYFFYSNIMNFFKTEITLANGEIRKRPLIETNGETGEIVWDKGRDFATV | |
| | RKVLSMPQVNIVKKTEVQTGGFSKESILPKRNSDKLIARKKDWDPKKYGGFDSPTVA | |
| | YSVLVVAKVEKGKSKKLKSVKELLGITIMERSSFEKNPIDFLEAKGYKEVKKDLIIK | |
| | LPKYSLFELENGRKRMLASAGELQKGNELALPSKYVNFLYLASHYEKLKGSPEDNEQ | |
| | KQLFVEQHKHYLDEIIEQISEFSKRVILADANLDKVLSAYNKHRDKPIREQAENIIH | |
| | LFTLTNLGAPAAFKYFDTTIDRKRYTSTKEVLDATLIHQSITGLYETRIDLSQLGGD | |

[0374] In some embodiments, the N-terminal methionine is removed from a Cas9 nickase, or from any Cas9 variant, ortholog, or equivalent disclosed or contemplated herein. For example, methionine-minus Cas9 nickases include the following sequences, or a variant thereof having an amino acid sequence that has at least 80%, at least 85%, at least 90%, at least 95%, or at least 99% sequence identity thereto.

| Description | Sequence |
|---|---|
| Cas9 nickase | DKKYSIGLDIGTNSVGWAVITDEYKVPSKKFKVLGNTDRHSIKKNLIGALLFDSGETAEATRLKRTARRR |
| (Met minus) | YTRRKNRICYLQEIFSNEMAKVDDSFFHRLEESFLVEEDKKHERHPIFGNIVDEVAYHEKYPTIYHLRKK |
| Streptococcus | LVDSTDKADLRLIYLALAHMIKFRGHFLIEGDLNPDNSDVDKLFIQLVQTYNQLFEENPINASGVDAKAI |
| pyogenes | LSARLSKSRRLENLIAQLPGEKKNGLFGNLIALSLGLTPNFKSNFDLAEDAKLQLSKDTYDDDLDNLLAQ |
| Q99ZW2 Cas9 | IGDQYADLFLAAKNLSDAILLSDILRVNTEITKAPLSASMIKRYDEHHQDLTLLKALVRQQLPEKYKEIF |
| with H840X, | FDQSKNGYAGYIDGGASQEEFYKFIKPILEKMDGTEELLVKLNREDLLRKQRTFDNGSIPHQIHLGELHA |
| wherein X is | ILRRQEDFYPFLKDNREKIEKILTFRIPYYVGPLARGNSRFAWMTRKSEETITPWNFEEVVDKGASAQSF |
| any | IERMTNFDKNLPNEKVLPKHSLLYEYFTVYNELTKVKYVTEGMRKPAFLSGEQKKAIVDLLFKTNRKVTV |
| alternate | KQLKEDYFKKIECFDSVEISGVEDRFNASLGTYHDLLKIIKDKDFLDNEENEDILEDIVLTLTLFEDREM |
| amino acid | IEERLKTYAHLFDDKVMKQLKRRRYTGWGRLSRKLINGIRDKQSGKTILDFLKSDGFANRNFMQLIHDDS |
| | LTFKEDIQKAQVSGQGDSLHEHIANLAGSPAIKKGILQTVKVVDELVKVMGRHKPENIVIEMARENQTTQ |
| | KGQKNSRERMKRIEEGIKELGSQILKEHPVENTQLQNEKLYLYYLQNGRDMYVDQELDINRLSDYDVDXI |
| | VPQSFLKDDSIDNKVLTRSDKNRGKSDNVPSEEVVKKMKNYWRQLLNAKLITQRKFDNLTKAERGGLSEL |
| | DKAGFIKRQLVETRQITKHVAQILDSRMNTKYDENDKLIREVKVITLKSKLVSDFRKDFQFYKVREINNY |
| | HHAHDAYLNAVVGTALIKKYPKLESEFVYGDYKVYDVRKMIAKSEQEIGKATAKYFFYSNIMNFFKTEIT |
| | LANGEIRKRPLIETNGETGEIVWDKGRDFATVRKVLSMPQVNIVKKTEVQTGGFSKESILPKRNSDKLIA |
| | RKKDWDPKKYGGFDSPTVAYSVLVVAKVEKGKSKKLKSVKELLGITIMERSSFEKNPIDFLEAKGYKEVK |
| | KDLIIKLPKYSLFELENGRKRMLASAGELQKGNELALPSKYVNFLYLASHYEKLKGSPEDNEQKQLFVEQ |
| | HKHYLDEIIEQISEFSKRVILADANLDKVLSAYNKHRDKPIREQAENIIHLFTLTNLGAPAAFKYFDTTI |
| | DRKRYTSTKEVLDATLIHQSITGLYETRIDLSQLGGD (SEQ ID NO: 351) |
| Cas9 nickase | DKKYSIGLDIGTNSVGWAVITDEYKVPSKKFKVLGNTDRHSIKKNLIGALLFDSGETAEATRLKRTARRR |
| Met minus) | YTRRKNRICYLQEIFSNEMAKVDDSFFHRLEESFLVEEDKKHERHPIFGNIVDEVAYHEKYPTIYHLRKK |
| Streptococcus | LVDSTDKADLRLIYLALAHMIKFRGHFLIEGDLNPDNSDVDKLFIQLVQTYNQLFEENPINASGVDAKAI |
| pyogenes | LSARLSKSRRLENLIAQLPGEKKNGLFGNLIALSLGLTPNFKSNFDLAEDAKLQLSKDTYDDDLDNLLAQ |
| Q99ZW2 Cas9 | IGDQYADLFLAAKNLSDAILLSDILRVNTEITKAPLSASMIKRYDEHHQDLTLLKALVRQQLPEKYKEIF |
| with H840A, | FDQSKNGYAGYIDGGASQEEFYKFIKPILEKMDGTEELLVKLNREDLLRKQRTFDNGSIPHQIHLGELHA |
| wherein X is | ILRRQEDFYPFLKDNREKIEKILTFRIPYYVGPLARGNSRFAWMTRKSEETITPWNFEEVVDKGASAQSF |
| any | IERMTNFDKNLPNEKVLPKHSLLYEYFTVYNELTKVKYVTEGMRKPAFLSGEQKKAIVDLLFKTNRKVTV |
| alternate | KQLKEDYFKKIECFDSVEISGVEDRFNASLGTYHDLLKIIKDKDFLDNEENEDILEDIVLTLTLFEDREM |
| amino acid | IEERLKTYAHLFDDKVMKQLKRRRYTGWGRLSRKLINGIRDKQSGKTILDFLKSDGFANRNFMQLIHDDS |
| | LTFKEDIQKAQVSGQGDSLHEHIANLAGSPAIKKGILQTVKVVDELVKVMGRHKPENIVIEMARENQTTQ |
| | KGQKNSRERMKRIEEGIKELGSQILKEHPVENTQLQNEKLYLYYLQNGRDMYVDQELDINRLSDYDVDAI |
| | VPQSFLKDDSIDNKVLTRSDKNRGKSDNVPSEEVVKKMKNYWRQLLNAKLITQRKFDNLTKAERGGLSEL |
| | DKAGFIKRQLVETRQITKHVAQILDSRMNTKYDENDKLIREVKVITLKSKLVSDFRKDFQFYKVREINNY |
| | HHAHDAYLNAVVGTALIKKYPKLESEFVYGDYKVYDVRKMIAKSEQEIGKATAKYFFYSNIMNFFKTEIT |
| | LANGEIRKRPLIETNGETGEIVWDKGRDFATVRKVLSMPQVNIVKKTEVQTGGFSKESILPKRNSDKLIA |
| | RKKDWDPKKYGGFDSPTVAYSVLVVAKVEKGKSKKLKSVKELLGITIMERSSFEKNPIDFLEAKGYKEVK |
| | KDLIIKLPKYSLFELENGRKRMLASAGELQKGNELALPSKYVNFLYLASHYEKLKGSPEDNEQKQLFVEQ |
| | HKHYLDEIIEQISEFSKRVILADANLDKVLSAYNKHRDKPIREQAENIIHLFTLTNLGAPAAFKYFDTTI |
| | DRKRYTSTKEVLDATLIHQSITGLYETRIDLSQLGGD (SEQ ID NO: 352) |
| Cas9 nickase | DKKYSIGLDIGTNSVGWAVITDEYKVPSKKFKVLGNTDRHSIKKNLIGALLFDSGETAEATRLKRTARRR |
| (Met minus) | YTRRKNRICYLQEIFSNEMAKVDDSFFHRLEESFLVEEDKKHERHPIFGNIVDEVAYHEKYPTIYHLRKK |
| Streptococcus | LVDSTDKADLRLIYLALAHMIKFRGHFLIEGDLNPDNSDVDKLFIQLVQTYNQLFEENPINASGVDAKAI |
| pyogenes | LSARLSKSRRLENLIAQLPGEKKNGLFGNLIALSLGLTPNFKSNFDLAEDAKLQLSKDTYDDDLDNLLAQ |
| Q99ZW2 Cas9 | IGDQYADLFLAAKNLSDAILLSDILRVNTEITKAPLSASMIKRYDEHHQDLTLLKALVRQQLPEKYKEIF |
| with R863X, | FDQSKNGYAGYIDGGASQEEFYKFIKPILEKMDGTEELLVKLNREDLLRKQRTFDNGSIPHQIHLGELHA |
| wherein X is | ILRRQEDFYPFLKDNREKIEKILTFRIPYYVGPLARGNSRFAWMTRKSEETITPWNFEEVVDKGASAQSF |
| any | IERMTNFDKNLPNEKVLPKHSLLYEYFTVYNELTKVKYVTEGMRKPAFLSGEQKKAIVDLLFKTNRKVTV |
| alternate | KQLKEDYFKKIECFDSVEISGVEDRFNASLGTYHDLLKIIKDKDFLDNEENEDILEDIVLTLTLFEDREM |
| amino acid | IEERLKTYAHLFDDKVMKQLKRRRYTGWGRLSRKLINGIRDKQSGKTILDFLKSDGFANRNFMQLIHDDS |
| | LTFKEDIQKAQVSGQGDSLHEHIANLAGSPAIKKGILQTVKVVDELVKVMGRHKPENIVIEMARENQTTQ |
| | KGQKNSRERMKRIEEGIKELGSQILKEHPVENTQLQNEKLYLYYLQNGRDMYVDQELDINRLSDYDVDHI |
| | VPQSFLKDDSIDNKVLTRSDKNXGKSDNVPSEEVVKKMKNYWRQLLNAKLITQRKFDNLTKAERGGLSEL |
| | DKAGFIKRQLVETRQITKHVAQILDSRMNTKYDENDKLIREVKVITLKSKLVSDFRKDFQFYKVREINNY |
| | HHAHDAYLNAVVGTALIKKYPKLESEFVYGDYKVYDVRKMIAKSEQEIGKATAKYFFYSNIMNFFKTEIT |
| | LANGEIRKRPLIETNGETGEIVWDKGRDFATVRKVLSMPQVNIVKKTEVQTGGFSKESILPKRNSDKLIA |
| | RKKDWDPKKYGGFDSPTVAYSVLVVAKVEKGKSKKLKSVKELLGITIMERSSFEKNPIDFLEAKGYKEVK |
| | KDLIIKLPKYSLFELENGRKRMLASAGELQKGNELALPSKYVNFLYLASHYEKLKGSPEDNEQKQLFVEQ |
| | HKHYLDEIIEQISEFSKRVILADANLDKVLSAYNKHRDKPIREQAENIIHLFTLTNLGAPAAFKYFDTTI |
| | DRKRYTSTKEVLDATLIHQSITGLYETRIDLSQLGGD (SEQ ID NO: 353) |
| Cas9 nickase | DKKYSIGLDIGTNSVGWAVITDEYKVPSKKFKVLGNTDRHSIKKNLIGALLFDSGETAEATRLKRTARRR |
| (Met minus) | YTRRKNRICYLQEIFSNEMAKVDDSFFHRLEESFLVEEDKKHERHPIFGNIVDEVAYHEKYPTIYHLRKK |
| Streptococcus | LVDSTDKADLRLIYLALAHMIKFRGHFLIEGDLNPDNSDVDKLFIQLVQTYNQLFEENPINASGVDAKAI |
| pyogenes | LSARLSKSRRLENLIAQLPGEKKNGLFGNLIALSLGLTPNFKSNFDLAEDAKLQLSKDTYDDDLDNLLAQ |
| Q99ZW2 Cas9 | IGDQYADLFLAAKNLSDAILLSDILRVNTEITKAPLSASMIKRYDEHHQDLTLLKALVRQQLPEKYKEIF |
| with R863A, | FDQSKNGYAGYIDGGASQEEFYKFIKPILEKMDGTEELLVKLNREDLLRKQRTFDNGSIPHQIHLGELHA |
| wherein X is | ILRRQEDFYPFLKDNREKIEKILTFRIPYYVGPLARGNSRFAWMTRKSEETITPWNFEEVVDKGASAQSF |
| any | IERMTNFDKNLPNEKVLPKHSLLYEYFTVYNELTKVKYVTEGMRKPAFLSGEQKKAIVDLLFKTNRKVTV |
| alternate | KQLKEDYFKKIECFDSVEISGVEDRFNASLGTYHDLLKIIKDKDFLDNEENEDILEDIVLTLTLFEDREM |
| amino acid | IEERLKTYAHLFDDKVMKQLKRRRYTGWGRLSRKLINGIRDKQSGKTILDFLKSDGFANRNFMQLIHDDS |
| | LTFKEDIQKAQVSGQGDSLHEHIANLAGSPAIKKGILQTVKVVDELVKVMGRHKPENIVIEMARENQTTQ |
| | KGQKNSRERMKRIEEGIKELGSQILKEHPVENTQLQNEKLYLYYLQNGRDMYVDQELDINRLSDYDVDHI |
| | VPQSFLKDDSIDNKVLTRSDKNAGKSDNVPSEEVVKKMKNYWRQLLNAKLITQRKFDNLTKAERGGLSEL |
| | DKAGFIKRQLVETRQITKHVAQILDSRMNTKYDENDKLIREVKVITLKSKLVSDFRKDFQFYKVREINNY |
| | HHAHDAYLNAVVGTALIKKYPKLESEFVYGDYKVYDVRKMIAKSEQEIGKATAKYFFYSNIMNFFKTEIT |
| | LANGEIRKRPLIETNGETGEIVWDKGRDFATVRKVLSMPQVNIVKKTEVQTGGFSKESILPKRNSDKLIA |
| | RKKDWDPKKYGGFDSPTVAYSVLVVAKVEKGKSKKLKSVKELLGITIMERSSFEKNPIDFLEAKGYKEVK |
| | KDLIIKLPKYSLFELENGRKRMLASAGELQKGNELALPSKYVNFLYLASHYEKLKGSPEDNEQKQLFVEQ |
| | HKHYLDEIIEQISEFSKRVILADANLDKVLSAYNKHRDKPIREQAENIIHLFTLTNLGAPAAFKYFDTTI |
| | DRKRYTSTKEVLDATLIHQSITGLYETRIDLSQLGGD (SEQ ID NO: 354) |

[0375] (e) Other Cas9 Variants

[0376] Besides dead Cas9 and Cas9 nickase variants, the Cas9 proteins used herein may also include other “Cas9 variants” having at least about 70% identical, at least about 80% identical, at least about 90% identical, at least about 95% identical, at least about 96% identical, at least about 97% identical, at least about 98% identical, at least about 99% identical, at least about 99.5% identical, or at least about 99.9% identical to any reference Cas9 protein, including any wild type Cas9, or mutant Cas9 (e.g., a dead Cas9 or Cas9 nickase), or fragment Cas9, or circular permutant Cas9, or other variant of Cas9 disclosed herein or known in the art. In some embodiments, a Cas9 variant may have 1, 2, 3, 4, 5, 6, 7, 8, 9, 10, 11, 12, 13, 14, 15, 16, 17, 18, 19, 20, 21, 22, 21, 24, 25, 26, 27, 28, 29, 30, 31, 32, 33, 34, 35, 36, 37, 38, 39, 40, 41, 42, 43, 44, 45, 46, 47, 48, 49, 50 or more amino acid changes compared to a reference Cas9. In some embodiments, the Cas9 variant comprises a fragment of a reference Cas9 (e.g., a gRNA binding domain or a DNA-cleavage domain), such that the fragment is at least about 70% identical, at least about 80% identical, at least about 90% identical, at least about 95% identical, at least about 96% identical, at least about 97% identical, at least about 98% identical, at least about 99% identical, at least about 99.5% identical, or at least about 99.9% identical to the corresponding fragment of wild type Cas9. In some embodiments, the fragment is at least 30%, at least 35%, at least 40%, at least 45%, at least 50%, at least 55%, at least 60%, at least 65%, at least 70%, at least 75%, at least 80%, at least 85%, at least 90%, at least 95% identical, at least 96%, at least 97%, at least 98%, at least 99%, or at least 99.5% of the amino acid length of a corresponding wild type Cas9 (e.g., SEQ ID NO: 1).

[0377] In some embodiments, the disclosure also may utilize Cas9 fragments which retain their functionality and which are fragments of any herein disclosed Cas9 protein. In some embodiments, the Cas9 fragment is at least 100 amino acids in length. In some embodiments, the fragment is at least 100, 150, 200, 250, 300, 350, 400, 450, 500, 550, 600, 650, 700, 750, 800, 850, 900, 950, 1000, 1050, 1100, 1150, 1200, 1250, or at least 1300 amino acids in length.

[0378] In various embodiments, the base editors disclosed herein may comprise one of the Cas9 variants described as follows, or a Cas9 variant thereof having at least about 70% identical, at least about 80% identical, at least about 90% identical, at least about 95% identical, at least about 96% identical, at least about 97% identical, at least about 98% identical, at least about 99% identical, at least about 99.5% identical, or at least about 99.9% identical to any reference Cas9 variants.

[0379] (f) Small-Sized Cas9 Variants

[0380] In some embodiments, the base editors contemplated herein can include a Cas9 protein that is of smaller molecular weight than the canonical SpCas9 sequence. In some embodiments, the smaller-sized Cas9 variants may facilitate delivery to cells, e.g., by an expression vector, nanoparticle, or other means of delivery.

[0381] The canonical SpCas9 protein is 1368 amino acids in length and has a predicted molecular weight of 158 kilodaltons. The term “small-sized Cas9 variant”, as used herein, refers to any Cas9 variant—naturally occurring, engineered, or otherwise—that is less than at least 1300 amino acids, or at least less than 1290 amino acids, or than less than 1280 amino acids, or less than 1270 amino acid, or less than 1260 amino acid, or less than 1250 amino acids, or less than 1240 amino acids, or less than 1230 amino acids, or less than 1220 amino acids, or less than 1210 amino acids, or less than 1200 amino acids, or less than 1190 amino acids, or less than 1180 amino acids, or less than 1170 amino acids, or less than 1160 amino acids, or less than 1150 amino acids, or less than 1140 amino acids, or less than 1130 amino acids, or less than 1120 amino acids, or less than 1110 amino acids, or less than 1100 amino acids, or less than 1050 amino acids, or less than 1000 amino acids, or less than 950 amino acids, or less than 900 amino acids, or less than 850 amino acids, or less than 800 amino acids, or less than 750 amino acids, or less than 700 amino acids, or less than 650 amino acids, or less than 600 amino acids, or less than 550 amino acids, or less than 500 amino acids, but at least larger than about 400 amino acids and retaining the required functions of the Cas9 protein.

[0382] In various embodiments, the base editors disclosed herein may comprise one of the small-sized Cas9 variants described as follows, or a Cas9 variant thereof having at least about 70% identical, at least about 80% identical, at least about 90% identical, at least about 95% identical, at least about 96% identical, at least about 97% identical, at least about 98% identical, at least about 99% identical, at least about 99.5% identical, or at least about 99.9% identical to any reference small-sized Cas9 protein.

| Description | Sequence | SEQ ID NO: |
|---|---|---|
| SaCas9 | MGKRNYILGLDIGITSVGYGIIDYETRDVIDAGVRLFKEANVENNEGRRSKRGARRL | SEQ ID NO: |
| Staphylococcus | KRRRRHRIQRVKKLLFDYNLLTDHSELSGINPYEARVKGLSQKLSEEEFSAALLHLA | 355 |
| aureus | KRRGVHNVNEVEEDTGNELSTKEQISRNSKALEEKYVAELQLERLKKDGEVRGSINR | |
| 1053 AA | FKTSDYVKEAKQLLKVQKAYHQLDQSFIDTYIDLLETRRTYYEGPGEGSPFGWKDIK | |
| 123 kDa | EWYEMLMGHCTYFPEELRSVKYAYNADLYNALNDLNNLVITRDENEKLEYYEKFQII | |
| | ENVFKQKKKPTLKQIAKEILVNEEDIKGYRVTSTGKPEFTNLKVYHDIKDITARKEI | |
| | IENAELLDQIAKILTIYQSSEDIQEELTNLNSELTQEEIEQISNLKGYTGTHNLSLK | |
| | AINLILDELWHTNDNQIAIFNRLKLVPKKVDLSQQKEIPTTLVDDFILSPVVKRSFI | |
| | QSIKVINAIIKKYGLPNDIIIELAREKNSKDAQKMINEMQKRNRQTNERIEEIIRTT | |
| | GKENAKYLIEKIKLHDMQEGKCLYSLEAIPLEDLLNNPFNYEVDHIIPRSVSFDNSF | |
| | NNKVLVKQEENSKKGNRTPFQYLSSSDSKISYETFKKHILNLAKGKGRISKTKKEYL | |
| | LEERDINRFSVQKDFINRNLVDTRYATRGLMNLLRSYFRVNNLDVKVKSINGGFTSF | |
| | LRRKWKFKKERNKGYKHHAEDALIIANADFIFKEWKKLDKAKKVMENQMFEEKQAES | |
| | MPEIETEQEYKEIFITPHQIKHIKDFKDYKYSHRVDKKPNRKLINDTLYSTRKDDKG | |
| | NTLIVNNLNGLYDKDNDKLKKLINKSPEKLLMYHHDPQTYQKLKLIMEQYGDEKNPL | |
| | YKYYEETGNYLTKYSKKDNGPVIKKIKYYGNKLNAHLDITDDYPNSRNKVVKLSLKP | |
| | YRFDVYLDNGVYKFVTVKNLDVIKKENYYEVNSKCYEEAKKLKKISNQAEFIASFYK | |
| | NDLIKINGELYRVIGVNNDLLNRIEVNMIDITYREYLENMNDKRPPHIIKTIASKTQ | |
| | SIKKYSTDILGNLYEVKSKKHPQIIKK | |
| NmeCas9 | MAAFKPNSINYILGLDIGIASVGWAMVEIDEEENPIRLIDLGVRVFERAEVPKTGDS | SEQ ID NO: |
| N. | LAMARRLARSVRRLTRRRAHRLLRTRRLLKREGVLQAANFDENGLIKSLPNTPWQLR | 356 |
| meningitidis | AAALDRKLTPLEWSAVLLHLIKHRGYLSQRKNEGETADKELGALLKGVAGNAHALQT | |
| 1083 AA | GDFRTPAELALNKFEKESGHIRNQRSDYSHTFSRKDLQAELILLFEKQKEFGNPHVS | |
| 124.5 kDa | GGLKEGIETLLMTQRPALSGDAVQKMLGHCTFEPAEPKAAKNTYTAERFIWLTKLNN | |
| | LRILEQGSERPLTDTERATLMDEPYRKSKLTYAQARKLLGLEDTAFFKGLRYGKDNA | |
| | EASTLMEMKAYHAISRALEKEGLKDKKSPLNLSPELQDEIGTAFSLFKTDEDITGRL | |
| | KDRIQPEILEALLKHISFDKFVQISLKALRRIVPLMEQGKRYDEACAEIYGDHYGKK | |
| | NTEEKIYLPPIPADEIRNPVVLRALSQARKVINGVVRRYGSPARIHIETAREVGKSF | |
| | KDRKEIEKRQEENRKDREKAAAKFREYFPNFVGEPKSKDILKLRLYEQQHGKCLYSG | |
| | KEINLGRLNEKGYVEIDAALPFSRTWDDSFNNKVLVLGSENQNKGNQTPYEYFNGKD | |
| | NSREWQEFKARVETSRFPRSKKQRILLQKFDEDGFKERNLNDTRYVNRFLCQFVADR | |
| | MRLTGKGKKRVFASNGQITNLLRGFWGLRKVRAENDRHHALDAVVVACSTVAMQQKI | |
| | TRFVRYKEMNAFDGKTIDKETGEVLHQKTHFPQPWEFFAQEVMIRVFGKPDGKPEFE | |
| | EADTLEKLRTLLAEKLSSRPEAVHEYVTPLFVSRAPNRKMSGQGHMETVKSAKRLDE | |
| | GVSVLRVPLTQLKLKDLEKMVNREREPKLYEALKARLEAHKDDPAKAFAEPFYKYDK | |
| | AGNRTQQVKAVRVEQVQKTGVWVRNHNGIADNATMVRVDVFEKGDKYYLVPIYSWQV | |
| | AKGILPDRAVVQGKDEEDWQLIDDSFNFKFSLHPNDLVEVITKKARMFGYFASCHRG | |
| | TGNINIRIHDLDHKIGKNGILEGIGVKTALSFQKYQIDELGKEIRPCRLKKRPPVR | |
| CjCas9 | MARILAFDIGISSIGWAFSENDELKDCGVRIFTKVENPKTGESLALPRRLARSARKR | SEQ ID NO: |
| C. jejuni | LARRKARLNHLKHLIANEFKLNYEDYQSFDESLAKAYKGSLISPYELRFRALNELLS | 357 |
| 984 AA | KQDFARVILHIAKRRGYDDIKNSDDKEKGAILKAIKQNEEKLANYQSVGEYLYKEYF | |
| 114.9 kDa | QKFKENSKEFTNVRNKKESYERCIAQSFLKDELKLIFKKQREFGFSFSKKFEEEVLS | |
| | VAFYKRALKDFSHLVGNCSFFTDEKRAPKNSPLAFMFVALTRIINLLNNLKNTEGIL | |
| | YTKDDLNALLNEVLKNGTLTYKQTKKLLGLSDDYEFKGEKGTYFIEFKKYKEFIKAL | |
| | GEHNLSQDDLNEIAKDITLIKDEIKLKKALAKYDLNQNQIDSLSKLEFKDHLNISFK | |
| | ALKLVTPLMLEGKKYDEACNELNLKVAINEDKKDFLPAFNETYYKDEVTNPVVLRAI | |
| | KEYRKVLNALLKKYGKVHKINIELAREVGKNHSQRAKIEKEQNENYKAKKDAELECE | |
| | KLGLKINSKNILKLRLFKEQKEFCAYSGEKIKISDLQDEKMLEIDHIYPYSRSFDDS | |
| | YMNKVLVFTKQNQEKLNQTPFEAFGNDSAKWQKIEVLAKNLPTKKQKRILDKNYKDK | |
| | EQKNFKDRNLNDTRYIARLVLNYTKDYLDFLPLSDDENTKLNDTQKGSKVHVEAKSG | |
| | MLTSALRHTWGFSAKDRNNHLHHAIDAVIIAYANNSIVKAFSDFKKEQESNSAELYA | |
| | KKISELDYKNKRKFFEPFSGFRQKVLDKIDEIFVSKPERKKPSGALHEETFRKEEEF | |
| | YQSYGGKEGVLKALELGKIRKVNGKIVKNGDMFRVDIFKHKKTNKFYAVPIYTMDFA | |
| | LKVLPNKAVARSKKGEIKDWILMDENYEFCFSLYKDSLILIQTKDMQEPEFVYYNAF | |
| | TSSTVSLIVSKHDNKFETLSKNQKILFKNANEKEVIAKSIGIQNLKVFEKYIVSALG | |
| | EVTKAEFRQREDFKK | |
| GeoCas9 | MRYKIGLDIGITSVGWAVMNLDIPRIEDLGVRIFDRAENPQTGESLALPRRLARSAR | SEQ ID NO: |
| G. | RRLRRRKHRLERIRRLVIREGILTKEELDKLFEEKHEIDVWQLRVEALDRKLNNDEL | 358 |
| stearothermophilus | ARVLLHLAKRRGFKSNRKSERSNKENSTMLKHIEENRAILSSYRTVGEMIVKDPKFA | |
| 1087 AA | LHKRNKGENYTNTIARDDLEREIRLIFSKQREFGNMSCTEEFENEyITIWASQRPVA | |
| 127 kDa | SKDDIEKKVGFCTFEPKEKRAPKATYTFQSFIAWEHINKLRLISPSGARGLTDEERR | |
| | LLYEQAFQKNKITYHDIRTLLHLPDDTYFKGIVYDRGESRKQNENIRFLELDAYHQI | |
| | RKAVDKVYGKGKSSSFLPIDFDTFGYALTLFKDDADIHSYLRNEYEQNGKRMPNLAN | |
| | KVYDNELIEELLNLSFTKFGHLSLKALRSILPYMEQGEVYSSACERAGYTFTGPKKK | |
| | QKTMLLPNIPPIANPVVMRALTQARKVVNAIIKKYGSPVSIHIELARDLSQTFDERR | |
| | KTKKEQDENRKKNETAIRQLMEYGLTLNPTGHDIVKFKLWSEQNGRCAYSLQPIEIE | |
| | RLLEPGYVEVDHVIPYSRSLDDSYTNKVLVLTRENREKGNRIPAEYLGVGTERWQQF | |
| | ETFVLTNKQFSKKKRDRLLRLHYDENEETEFKNRNLNDTRYISRFFANFIREHLKFA | |
| | ESDDKQKVYTVNGRVTAHLRSRWEFNKNREESDLHHAVDAVIVACTTPSDIAKVTAF | |
| | YQRREQNKELAKKTEPHFPQPWPHFADELRARLSKHPKESIKALNLGNYDDQKLESL | |
| | QPVFVSRMPKRSVTGAAHQETLRRYVGIDERSGKIQTVVKTKLSEIKLDASGHFPMY | |
| | GKESDPRTYEAIRQRLLEHNNDPKKAFQEPLYKPKKNGEPGPVIRTVKIIDTKNQVI | |
| | PLNDGKTVAYNSNIVRVDVFEKDGKYYCVPVYTMDIMKGILPNKAIEPNKPYSEWKE | |
| | MTEDYTFRFSLYPNDLIRIELPREKTVKTAAGEEINVKDVFVYYKTIDSANGGLELI | |
| | SHDHRFSLRGVGSRTLKRFEKYQVDVLGNIYKVRGEKRVGLASSAHSKPGKTIRPLQ | |
| | STRD | |
| LbaCas12a | MSKLEKFTNCYSLSKTLRFKAIPVGKTQENIDNKRLLVEDEKRAEDYKGVKKLLDRY | SEQ ID NO: |
| L. bacterium | YLSFINDVLHSIKLKNLNNYISLFRKKTRTEKENKELENLEINLRKEIAKAFKGNEG | 359 |
| 1228 AA | YKSLFKKDIIETILPEFLDDKDEIALVNSFNGFTTAFTGFFDNRENMFSEEAKSTSI | |
| 143.9 kDa | AFRCINENLTRYISNMDIFEKVDAIFDKHEVQEIKEKILNSDYDVEDFFEGEFFNFV | |
| | LTQEGIDVYNAIIGGFVTESGEKIKGLNEYINLYNQKTKQKLPKFKPLYKQVLSDRE | |
| | SLSFYGEGYTSDEEVLEVFRNTLNKNSEIFSSIKKLEKLFKNFDEYSSAGIFVKNGP | |
| | AISTISKDIFGEWNVIRDKWNAEYDDIHLKKKAVVTEKYEDDRRKSFKKIGSFSLEQ | |
| | LQEYADADLSVVEKLKEIIIQKVDEIYKVYGSSEKLFDADFVLEKSLKKNDAVVAIM | |
| | KDLLDSVKSFENYIKAFFGEGKETNRDESFYGDFVLAYDILLKVDHIYDAIRNYVTQ | |
| | KPYSKDKFKLYFQNPQFMGGWDKDKETDYRATILRYGSKYYLAIMDKKYAKCLQKID | |
| | KDDVNGNYEKINYKLLPGPNKMLPKVFFSKKWMAYYNPSEDIQKIYKNGTFKKGDMF | |
| | NLNDCHKLIDFFKDSISRYPKWSNAYDFNFSETEKYKDIAGFYREVEEQGYKVSFES | |
| | ASKKEVDKLVEEGKLYMFQIYNKDFSDKSHGTPNLHTMYFKLLFDENNHGQIRLSGG | |
| | AELFMRRASLKKEELVVHPANSPIANKNPDNPKKTTTLSYDVYKDKRFSEDQYELHI | |
| | PIAINKCPKNIFKINTEVRVLLKHDDNPYVIGIDRGERNLLYIVVVDGKGNIVEQYS | |
| | LNEIINNFNGIRIKTDYHSLLDKKEKERFEARQNWTSIENIKELKAGYISQVVHKIC | |
| | ELVEKYDAVIALEDLNSGFKNSRVKVEKQVYQKFEKMLIDKLNYMVDKKSNPCATGG | |
| | ALKGYQITNKFESFKSMSTQNGFIFYIPAWLTSKIDPSTGFVNLLKTKYTSIADSKK | |
| | FISSFDRIMYVPEEDLFEFALDYKNFSRTDADYIKKWKLYSYGNRIRIFRNPKKNNV | |
| | FDWEEVCLTSAYKELFNKYGINYQQGDIRALLCEQSDKAFYSSFMALMSLMLQMRNS | |
| | ITGRTDVDFLISPVKNSDGIFYDSRNYEAQENAILPKNADANGAYNIARKVLWAIGQ | |
| | FKKAEDEKLDKVKIAISNKEWLEYAQTSVKH | |
| BhCas12b | MATRSFILKIEPNEEVKKGLWKTHEVLNHGIAYYMNILKLIRQEAIYEHHEQDPKNP | SEQ ID NO: |
| B. hisashii | KKVSKAEIQAELWDFVLKMQKCNSFTHEVDKDEVFNILRELYEELVPSSVEKKGEAN | 360 |
| 1108 AA | QLSNKFLYPLVDPNSQSGKGTASSGRKPRWYNLKIAGDPSWEEEKKKWEEDKKKDPL | |
| 130.4 kDa | AKILGKLAEYGLIPLFIPYTDSNEPIVKEIKWMEKSRNQSVRRLDKDMFIQALERFL | |
| | swESWNLKVKEEYEKVEKEYKTLEERIKEDIQALKALEQYEKERQEQLLRDTLNTNE | |
| | YRLSKRGLRGWREIIQKWLKMDENEPSEKYLEVFKDYQRKHPREAGDYSVYEFLSKK | |
| | ENHFIWRNHPEYPYLYATFCEIDKKKKDAKQQATFTLADPINHPLWVRFEERSGSNL | |
| | NKYRILTEQLHTEKLKKKLTVQLDRLIYPTESGGWEEKGKVDIVLLPSRQFYNQIFL | |
| | DIEEKGKHAFTYKDESIKFPLKGTLGGARVQFDRDHLRRYPHKVESGNVGRIYFNMT | |
| | VNIEPTESPVSKSLKIHRDDFPKVVNFKPKELTEWIKDSKGKKLKSGIESLEIGLRV | |
| | MSIDLGQRQAAAASIFEVVDQKPDIEGKLFFPIKGTELYAVHRASFNIKLPGETLVK | |
| | SREVLRKAREDNLKLMNQKLNFLRNVLHFQQFEDITEREKRVTKWISRQENSDVPLV | |
| | YQDELIQIRELMYKPYKDWVAFLKQLHKRLEVEIGKEVKHWRKSLSDGRKGLYGISL | |
| | KNIDEIDRTRKFLLRWSLRPTEPGEVRRLEPGQRFAIDQLNHLNALKEDRLKKMANT | |
| | IIMHALGYCYDVRKKKWQAKNPACQIILFEDLSNYNPYEERSRFENSKLMKWSRREI | |
| | PRQVALQGEIYGLQVGEVGAQFSSRFHAKTGSPGIRCSVVTKEKLQDNRFFKNLQRE | |
| | GRLTLDKIAVLKEGDLYPDKGGEKFISLSKDRKCVTTHADINAAQNLQKRFWTRTHG | |
| | FYKVYCKAYQVDGQTVYIPESKDQKQKIIEEFGEGYFILKDGVYEWVNAGKLKIKKG | |
| | SSKQSSSELVDSDILKDSFDLASELKGEKLMLYRDPSGNVFPSDKWMAAGVFFGKLE | |
| | RILISKLTNQYSISTIEDDSSKQSM | |

[0383] (g) Cas9 Equivalents

[0384] In some embodiments, the base editors described herein can include any Cas9 equivalent. As used herein, the term “Cas9 equivalent” is a broad term that encompasses any napDNAbp protein that serves the same function as Cas9 in the present base editors despite that its amino acid primary sequence and/or its three-dimensional structure may be different and/or unrelated from an evolutionary standpoint. Thus, while Cas9 equivalents include any Cas9 ortholog, homolog, mutant, or variant described or embraced herein that are evolutionarily related, the Cas9 equivalents also embrace proteins that may have evolved through convergent evolution processes to have the same or similar function as Cas9, but which do not necessarily have any similarity with regard to amino acid sequence and/or three dimensional structure. The base editors described here embrace any Cas9 equivalent that would provide the same or similar function as Cas9 despite that the Cas9 equivalent may be based on a protein that arose through convergent evolution.

[0385] For example, CasX is a Cas9 equivalent that reportedly has the same function as Cas9 but which evolved through convergent evolution. Thus, the CasX protein described in Liu et al., “CasX enzymes comprises a distinct family of RNA-guided genome editors,” Nature, 2019, Vol. 566: 218-223, is contemplated to be used with the base editors described herein. In addition, any variant or modification of CasX is conceivable and within the scope of the present disclosure.

[0386] Cas9 is a bacterial enzyme that evolved in a wide variety of species. However, the Cas9 equivalents contemplated herein may also be obtained from archaea, which constitute a domain and kingdom of single-celled prokaryotic microbes different from bacteria.

[0387] In some embodiments, Cas9 equivalents may refer to CasX or CasY, which have been described in, for example, Burstein et al., “New CRISPR-Cas systems from uncultivated microbes.” Cell Res. 2017 Feb. 21. doi: 10.1038/cr.2017.21, the entire contents of which is hereby incorporated by reference. Using genome-resolved metagenomics, a number of CRISPR-Cas systems were identified, including the first reported Cas9 in the archaeal domain of life. This divergent Cas9 protein was found in little-studied nanoarchaea as part of an active CRISPR-Cas system. In bacteria, two previously unknown systems were discovered, CRISPR-CasX and CRISPR-CasY, which are among the most compact systems yet discovered. In some embodiments, Cas9 refers to CasX, or a variant of CasX. In some embodiments, Cas9 refers to a CasY, or a variant of CasY. It should be appreciated that other RNA-guided DNA binding proteins may be used as a nucleic acid programmable DNA binding protein (napDNAbp), and are within the scope of this disclosure. Also see Liu et al., “CasX enzymes comprises a distinct family of RNA-guided genome editors,” Nature, 2019, Vol. 566: 218-223. Any of these Cas9 equivalents are contemplated.

[0388] In some embodiments, the Cas9 equivalent comprises an amino acid sequence that is at least 85%, at least 90%, at least 91%, at least 92%, at least 93%, at least 94%, at least 95%, at least 96%, at least 97%, at least 98%, at least 99%, or at least 99.5% identical to a naturally-occurring CasX or CasY protein. In some embodiments, the napDNAbp is a naturally-occurring CasX or CasY protein. In some embodiments, the napDNAbp comprises an amino acid sequence that is at least 85%, at least 90%, at least 91%, at least 92%, at least 93%, at least 94%, at least 95%, at least 96%, at least 97%, at least 98%, at least 99%, or at least 99.5% identical to a wild-type Cas moiety or any Cas moiety provided herein.

[0389] In various embodiments, the nucleic acid programmable DNA binding proteins include, without limitation, Cas9 (e.g., dCas9 and nCas9), CasX, CasY, Cpf1, C2c1, C2c2, C2C3, Argonaute, Cas12a, and Cas12b. One example of a nucleic acid programmable DNA-binding protein that has different PAM specificity than Cas9 is Clustered Regularly Interspaced Short Palindromic Repeats from Prevotella and Francisella 1 (Cpf1). Similar to Cas9, Cpf1 is also a class 2 CRISPR effector. It has been shown that Cpf1 mediates robust DNA interference with features distinct from Cas9. Cpf1 is a single RNA-guided endonuclease lacking tracrRNA, and it utilizes a T-rich protospacer-adjacent motif (TTN, TTTN, or YTN). Moreover, Cpf1 cleaves DNA via a staggered DNA double-stranded break. Out of 16 Cpf1-family proteins, two enzymes from Acidaminococcus and Lachnospiraceae are shown to have efficient genome-editing activity in human cells. Cpf1 proteins are known in the art and have been described previously, for example Yamano et al., “Crystal structure of Cpf1 in complex with guide RNA and target DNA.” Cell (165) 2016, p. 949-962; the entire contents of which is hereby incorporated by reference. The state of the art may also now refer to Cpf1 enzymes as Cas12a.

[0390] In still other embodiments, the Cas protein may include any CRISPR associated protein, including but not limited to, Cas12a, Cas12b, Cas1, Cas1B, Cas2, Cas3, Cas4, Cas5, Cas6, Cas7, Cas8, Cas9 (also known as Csn1 and Csx12), Cas10, Csy1, Csy2, Csy3, Cse1, Cse2, Csc1, Csc2, Csa5, Csn2. Csm2, Csm3, Csm4, Csm5, Csm6, Cmr1, Cmr3, Cmr4, Cmr5, Cmr6, Csb1, Csb2, Csb3, Csx17, Csx14, Csx10, Csx16, CsaX, Csx3, Csx1, Csx15, Csf1, Csf2, Csf3, Csf4, homologs thereof, or modified versions thereof, and preferably comprising a nickase mutation (e.g., a mutation corresponding to the D10A mutation of the wild type Cas9 polypeptide of SEQ ID NO:1).

[0391] In various other embodiments, the napDNAbp can be any of the following proteins: a Cas9, a Cpf1, a CasX, a CasY, a C2c1, a C2c2, a C2c3, a GeoCas9, a CjCas9, a Cas12a, a Cas12b, a Cas12g, a Cas12h, a Cas12i, a Cas13b, a Cas13c, a Cas13d, a Cas14, a Csn2, an xCas9, an SpCas9-NG, a circularly permuted Cas9, or an Argonaute (Ago) domain, or a variant thereof.

[0392] Exemplary Cas9 equivalent protein sequences can include the following:

| Description | Sequence |
|---|---|
| AsCas12a | MTQFEGFTNLYQVSKTLRFELIPQGKTLKHIQEQGFIEEDKARNDHYKELKPIIDRIYKTYADQCLQLVQL |
| (previously | DWENLSAAIDSYRKEKTEETRNALIEEQATYRNAIHDYFIGRTDNLTDAINKRHAEIYKGLFKAELFNGKV |
| known as | LKQLGTVTTTEHENALLRSFDKFTTYFSGFYENRKNVFSAEDISTAIPHRIVQDNFPKFKENCHIFTRLIT |
| Cpf1) | AVPSLREHFENVKKAIGIFVSTSIEEVFSFPFYNQLLTQTQIDLYNQLLGGISREAGTEKIKGLNEVLNLA |
| Acidaminococcus | IQKNDETAHIIASLPHRFIPLFKQILSDRNTLSFILEEFKSDEEVIQSFCKYKTLLRNENVLETAEALFNE |
| sp. | LNSIDLTHIFISHKKLETISSALCDHWDTLRNALYERRISELTGKITKSAKEKVQRSLKHEDINLQEIISA |
| (strain | AGKELSEAFKQKTSEILSHAHAALDQPLPTTLKKQEEKEILKSQLDSLLGLYHLLDWFAVDESNEVDPEFS |
| BV3L6) | ARLTGIKLEMEPSLSFYNKARNYATKKPYSVEKFKLNFQMPTLASGWDVNKEKNNGAILFVKNGLYYLGIM |
| UniProtKB | PKQKGRYKALSFEPTEKTSEGFDKMYYDYFPDAAKMIPKCSTQLKAVTAHFQTHTTPILLSNNFIEPLEIT |
| U2UMQ6 | KEIYDLNNPEKEPKKFQTAYAKKTGDQKGYREALCKWIDFTRDFLSKYTKTTSIDLSSLRPSSQYKDLGEY |
| | YAELNPLLYHISFQRIAEKEIMDAVETGKLYLFQIYNKDFAKGHHGKPNLHTLYWTGLFSPENLAKTSIKL |
| | NGQAELFYRPKSRMKRMAHRLGEKMLNKKLKDQKTPIPDTLYQELYDYVNHRLSHDLSDEARALLPNVITK |
| | EVSHEIIKDRRFTSDKFFFHVPITLNYQAANSPSKFNQRVNAYLKEHPETPIIGIDRGERNLIYITVIDST |
| | GKILEQRSLNTIQQFDYQKKLDNREKERVAARQAWSVVGTIKDLKQGYLSQVIHEIVDLMIHYQAVVVLEN |
| | LNFGFKSKRTGIAEKAVYQQFEKMLIDKLNCLVLKDYPAEKVGGVLNPYQLTDQFTSFAKMGTQSGFLFYV |
| | PAPYTSKIDPLTGFVDPFVWKTIKNHESRKHFLEGFDFLHYDVKTGDFILHFKMNRNLSFQRGLPGFMPAW |
| | DIVFEKNETQFDAKGTPFIAGKRIVPVIENHRFTGRYRDLYPANELIALLEEKGIVFRDGSNILPKLLEND |
| | DSHAIDTMVALIRSVLQMRNSNAATGEDYINSPVRDLNGVCFDSRFQNPEWPMDADANGAYHIALKGQLLL |
| | NHLKESKDLKLQNGISNQDWLAYIQELRN (SEQ ID NO: 361) |
| AsCas12a | MTQFEGFTNLYQVSKTLRFELIPQGKTLKHIQEQGFIEEDKARNDHYKELKPIIDRIYKTYADQCLQLVQL |
| nickase | DWENLSAAIDSYRKEKTEETRNALIEEQATYRNAIHDYFIGRTDNLTDAINKRHAEIYKGLFKAELFNGKV |
| (e.g., | LKQLGTVTTTEHENALLRSFDKFTTYFSGFYENRKNVFSAEDISTAIPHRIVQDNFPKFKENCHIFTRLIT |
| R122 6A) | AVPSLREHFENVKKAIGIFVSTSIEEVFSFPFYNQLLTQTQIDLYNQLLGGISREAGTEKIKGLNEVLNLA |
| | IQKNDETAHIIASLPHRFIPLFKQILSDRNTLSFILEEFKSDEEVIQSFCKYKTLLRNENVLETAEALFNE |
| | LNSIDLTHIFISHKKLETISSALCDHWDTLRNALYERRISELTGKITKSAKEKVQRSLKHEDINLQEIISA |
| | AGKELSEAFKQKTSEILSHAHAALDQPLPTTLKKQEEKEILKSQLDSLLGLYHLLDWFAVDESNEVDPEFS |
| | ARLTGIKLEMEPSLSFYNKARNYATKKPYSVEKFKLNFQMPTLASGWDVNKEKNNGAILFVKNGLYYLGIM |
| | PKQKGRYKALSFEPTEKTSEGFDKMYYDYFPDAAKMIPKCSTQLKAVTAHFQTHTTPILLSNNFIEPLEIT |
| | KEIYDLNNPEKEPKKFQTAYAKKTGDQKGYREALCKWIDFTRDFLSKYTKTTSIDLSSLRPSSQYKDLGEY |
| | YAELNPLLYHISFQRIAEKEIMDAVETGKLYLFQIYNKDFAKGHHGKPNLHTLYWTGLFSPENLAKTSIKL |
| | NGQAELFYRPKSRMKRMAHRLGEKMLNKKLKDQKTPIPDTLYQELYDYVNHRLSHDLSDEARALLPNVITK |
| | EVSHEIIKDRRFTSDKFFFHVPITLNYQAANSPSKFNQRVNAYLKEHPETPIIGIDRGERNLIYITVIDST |
| | GKILEQRSLNTIQQFDYQKKLDNREKERVAARQAWSVVGTIKDLKQGYLSQVIHEIVDLMIHYQAVVVLEN |
| | LNFGFKSKRTGIAEKAVYQQFEKMLIDKLNCLVLKDYPAEKVGGVLNPYQLTDQFTSFAKMGTQSGFLFYV |
| | PAPYTSKIDPLTGFVDPFVWKTIKNHESRKHFLEGFDFLHYDVKTGDFILHFKMNRNLSFQRGLPGFMPAW |
| | DIVFEKNETQFDAKGTPFIAGKRIVPVIENHRFTGRYRDLYPANELIALLEEKGIVFRDGSNILPKLLEND |
| | DSHAIDTMVALIRSVLQMANSNAATGEDYINSPVRDLNGVCFDSRFQNPEWPMDADANGAYHIALKGQLLL |
| | NHLKESKDLKLQNGISNQDWLAYIQELRN (SEQ ID NO: 362) |
| LbCas12a | MNYKTGLEDFIGKESLSKTLRNALIPTESTKIHMEEMGVIRDDELRAEKQQELKEIMDDYYRTFIEEKLGQ |
| (previously | IQGIQWNSLFQKMEETMEDISVRKDLDKIQNEKRKEICCYFTSDKRFKDLFNAKLITDILPNFIKDNKEYT |
| known as | EEEKAEKEQTRVLFQRFATAFTNYFNQRRNNFSEDNISTAISFRIVNENSEIHLQNMRAFQRIEQQYPEEV |
| Cpf1) | CGMEEEYKDMLQEWQMKHIYSVDFYDRELTQPGIEYYNGICGKINEHMNQFCQKNRINKNDFRMKKLHKQI |
| Lachnospiraceae | LCKKSSYYEIPFRFESDQEVYDALNEFIKTMKKKEIIRRCVHLGQECDDYDLGKIYISSNKYEQISNALYG |
| bacterium | SWDTIRKCIKEEYMDALPGKGEKKEEKAEAAAKKEEYRSIADIDKIISLYGSEMDRTISAKKCITEICDMA |
| GAM79 | GQISIDPLVCNSDIKLLQNKEKTTEIKTILDSFLHVYQWGQTFIVSDIIEKDSYFYSELEDVLEDFEGITT |
| Ref Seq. | LYNHVRSYVTQKPYSTVKFKLHFGSPTLANGWSQSKEYDNNAILLMRDQKFYLGIFNVRNKPDKQIIKGHE |
| WP_119623382.1 | KEEKGDYKKMIYNLLPGPSKMLPKVFITSRSGQETYKPSKHILDGYNEKRHIKSSPKFDLGYCWDLIDYYK |
| | ECIHKHPDWKNYDFHFSDTKDYEDISGFYREVEMQGYQIKWTYISADEIQKLDEKGQIFLFQIYNKDFSVH |
| | STGKDNLHTMYLKNLFSEENLKDIVLKLNGEAELFFRKASIKTPIVHKKGSVLVNRSYTQTVGNKEIRVSI |
| | PEEYYTEIYNYLNHIGKGKLSSEAQRYLDEGKIKSFTATKDIVKNYRYCCDHYFLHLPITINFKAKSDVAV |
| | NERTLAYIAKKEDIHIIGIDRGERNLLYISVVDVHGNIREQRSFNIVNGYDYQQKLKDREKSRDAARKNWE |
| | EIEKIKELKEGYLSMVIHYIAQLVVKYNAVVAMEDLNYGFKTGRFKVERQVYQKFETMLIEKLHYLVFKDR |
| | EVCEEGGVLRGYQLTYIPESLKKVGKQCGFIFYVPAGYTSKIDPTTGFVNLFSFKNLTNRESRQDFVGKFD |
| | EIRYDRDKKMFEFSFDYNNYIKKGTILASTKWKVYTNGTRLKRIVVNGKYTSQSMEVELTDAMEKMLQRAG |
| | IEYHDGKDLKGQIVEKGIEAEIIDIFRLTVQMRNSRSESEDREYDRLISPVLNDKGEFFDTATADKTLPQD |
| | ADANGAYCIALKGLYEVKQIKENWKENEQFPRNKLVQDNKTWFDFMQKKRYL (SEQ ID NO: 363) |
| PcCas12a - | MAKNFEDFKRLYSLSKTLRFEAKPIGATLDNIVKSGLLDEDEHRAASYVKVKKLIDEYHKVFIDRVLDDGC |
| previously | LPLENKGNNNSLAEYYESYVSRAQDEDAKKKFKEIQQNLRSVIAKKLTEDKAYANLFGNKLIESYKDKEDK |
| known at | KKIIDSDLIQFINTAESTQLDSMSQDEAKELVKEFWGFVTYFYGFFDNRKNMYTAEEKSTGIAYRLVNENL |
| Cpf1 | PKFIDNIEAFNRAITRPEIQENMGVLYSDFSEYLNVESIQEMFQLDYYNMLLTQKQIDVYNAIIGGKTDDE |
| Prevotella | HDVKIKGINEYINLYNQQHKDDKLPKLKALFKQILSDRNAISWLPEEFNSDQEVLNAIKDCYERLAENVLG |
| copri | DKVLKSLLGSLADYSLDGIFIRNDLQLTDISQKMFGNWGVIQNAIMQNIKRVAPARKHKESEEDYEKRIAG |
| Ref Seq. | IFKKADSFSISYINDCLNEADPNNAYFVENYFATFGAVNTPTMQRENLFALVQNAYTEVAALLHSDYPTVK |
| WP_119227726.1 | HLAQDKANVSKIKALLDAIKSLQHFVKPLLGKGDESDKDERFYGELASLWAELDTVTPLYNMIRNYMTRKP |
| | YSQKKIKLNFENPQLLGGWDANKEKDYATIILRRNGLYYLAIMDKDSRKLLGKAMPSDGECYEKMVYKFFK |
| | DVTTMIPKCSTQLKDVQAYFKVNTDDYVLNSKAFNKPLTITKEVFDLNNVLYGKYKKFQKGYLTATGDNVG |
| | YTHAVNVWIKFCMDFLNSYDSTCIYDFSSLKPESYLSLDAFYQDANLLLYKLSFARASVSYINQLVEEGKM |
| | YLFQIYNKDFSEYSKGTPNMHTLYWKALFDERNLADVVYKLNGQAEMFYRKKSIENTHPTHPANHPILNKN |
| | KDNKKKESLFDYDLIKDRRYTVDKFMFHVPITMNFKSVGSENINQDVKAYLRHADDMHIIGIDRGERHLLY |
| | LVVIDLQGNIKEQYSLNEIVNEYNGNTYHTNYHDLLDVREEERLKARQSWQTIENIKELKEGYLSQVIHKI |
| | TQLMVRYHAIVVLEDLSKGFMRSRQKVEKQVYQKFEKMLIDKLNYLVDKKTDVSTPGGLLNAYQLTCKSDS |
| | SQKLGKQSGFLFYIPAWNTSKIDPVTGFVNLLDTHSLNSKEKIKAFFSKFDAIRYNKDKKWFEFNLDYDKF |
| | GKKAEDTRTKWTLCTRGMRIDTFRNKEKNSQWDNQEVDLTTEMKSLLEHYYIDIHGNLKDAISAQTDKAFF |
| | TGLLHILKLTLQMRNSITGTETDYLVSPVADENGIFYDSRSCGNQLPENADANGAYNIARKGLMLIEQIKN |
| | AEDLNNVKFDISNKAWLNFAQQKPYKNG (SEQ ID NO: 364) |
| ErCas12a - | MFSAKLISDILPEFVIHNNNYSASEKEEKTQVIKLFSRFATSFKDYFKNRANCFSANDISSSSCHRIVNDN |
| previously | AEIFFSNALVYRRIVKNLSNDDINKISGDMKDSLKEMSLEEIYSYEKYGEFITQEGISFYNDICGKVNLFM |
| known at | NLYCQKNKENKNLYKLRKLHKQILCIADTSYEVPYKFESDEEVYQSVNGFLDNISSKHIVERLRKIGENYN |
| Cpf1 | GYNLDKIYIVSKFYESVSQKTYRDWETINTALEIHYNNILPGNGKSKADKVKKAVKNDLQKSITEINELVS |
| Eubacterium | NYKLCPDDNIKAETYIHEISHILNNFEAQELKYNPEIHLVESELKASELKNVLDVIMNAFHWCSVFMTEEL |
| rectale | VDKDNNFYAELEEIYDEIYPVISLYNLVRNYVTQKPYSTKKIKLNFGIPTLADGWSKSKEYSNNAIILMRD |
| Ref Seq. | NLYYLGIFNAKNKPDKKIIEGNTSENKGDYKKMIYNLLPGPNKMIPKVFLSSKTGVETYKPSAYILEGYKQ |
| WP_119223642.1 | NKHLKSSKDFDITFCHDLIDYFKNCIAIHPEWKNFGFDFSDTSTYEDISGFYREVELQGYKIDWTYISEKD |
| | IDLLQEKGQLYLFQIYNKDFSKKSSGNDNLHTMYLKNLFSEENLKDIVLKLNGEAEIFFRKSSIKNPIIHK |
| | KGSILVNRTYEAEEKDQFGNIQIVRKTIPENIYQELYKYFNDKSDKELSDEAAKLKNVVGHHEAATNIVKD |
| | YRYTYDKYFLHMPITINFKANKTSFINDRILQYIAKEKDLHVIGIDRGERNLIYVSVIDTCGNIVEQKSFN |
| | IVNGYDYQIKLKQQEGARQIARKEWKEIGKIKEIKEGYLSLVIHEISKMVIKYNAIIAMEDLSYGFKKGRF |
| | KVERQVYQKFETMLINKLNYLVFKDISITENGGLLKGYQLTYIPDKLKNVGHQCGCIFYVPAAYTSKIDPT |
| | TGFVNIFKFKDLTVDAKREFIKKFDSIRYDSDKNLFCFTFDYNNFITQNTVMSKSSWSVYTYGVRIKRRFV |
| | NGRFSNESDTIDITKDMEKTLEMTDINWRDGHDLRQDIIDYEIVQHIFEIFKLTVQMRNSLSELEDRDYDR |
| | LISPVLNENNIFYDSAKAGDALPKDADANGAYCIALKGLYEIKQITENWKEDGKFSRDKLKISNKDWFDFI |
| | QNKRYL (SEQ ID NO: 365) |
| CsCas12a - | MNYKTGLEDFIGKESLSKTLRNALIPTESTKIHMEEMGVIRDDELRAEKQQELKEIMDDYYRAFIEEKLGQ |
| previously | IQGIQWNSLFQKMEETMEDISVRKDLDKIQNEKRKEICCYFTSDKRFKDLFNAKLITDILPNFIKDNKEYT |
| known at | EEEKAEKEQTRVLFQRFATAFTNYFNQRRNNFSEDNISTAISFRIVNENSEIHLQNMRAFQRIEQQYPEEV |
| Cpf1 | CGMEEEYKDMLQEWQMKHIYLVDFYDRVLTQPGIEYYNGICGKINEHMNQFCQKNRINKNDFRMKKLHKQI |
| Clostridium | LCKKSSYYEIPFRFESDQEVYDALNEFIKTMKEKEIICRCVHLGQKCDDYDLGKIYISSNKYEQISNALYG |
| sp. AF34- | SWDTIRKCIKEEYMDALPGKGEKKEEKAEAAAKKEEYRSIADIDKIISLYGSEMDRTISAKKCITEICDMA |
| 10BH | GQISTDPLVCNSDIKLLQNKEKTTEIKTILDSFLHVYQWGQTFIVSDIIEKDSYFYSELEDVLEDFEGITT |
| Ref Seq. | LYNHVRSYVTQKPYSTVKFKLHFGSPTLANGWSQSKEYDNNAILLMRDQKFYLGIFNVRNKPDKQIIKGHE |
| WP_118538418.1 | KEEKGDYKKMIYNLLPGPSKMLPKVFITSRSGQETYKPSKHILDGYNEKRHIKSSPKFDLGYCWDLIDYYK |
| | ECIHKHPDWKNYDFHFSDTKDYEDISGFYREVEMQGYQIKWTYISADEIQKLDEKGQIFLFQIYNKDFSVH |
| | STGKDNLHTMYLKNLFSEENLKDIVLKLNGEAELFFRKASIKTPVVHKKGSVLVNRSYTQTVGDKEIRVSI |
| | PEEYYTEIYNYLNHIGRGKLSTEAQRYLEERKIKSFTATKDIVKNYRYCCDHYFLHLPITINFKAKSDIAV |
| | NERTLAYIAKKEDIHIIGIDRGERNLLYISVVDVHGNIREQRSFNIVNGYDYQQKLKDREKSRDAARKNWE |
| | EIEKIKELKEGYLSMVIHYIAQLVVKYNAVVAMEDLNYGFKTGRFKVERQVYQKFETMLIEKLHYLVFKDR |
| | EVCEEGGVLRGYQLTYIPESLKKVGKQCGFIFYVPAGYTSKIDPTTGFVNLFSFKNLTNRESRQDFVGKFD |
| | EIRYDRDKKMFEFSFDYNNYIKKGTMLASTKWKVYTNGTRLKRIVVNGKYTSQSMEVELTDAMEKMLQRAG |
| | IEYHDGKDLKGQIVEKGIEAEIIDIFRLTVQMRNSRSESEDREYDRLISPVLNDKGEFFDTATADKTLPQD |
| | ADANGAYCIALKGLYEVKQIKENWKENEQFPRNKLVQDNKTWFDFMQKKRYL (SEQ ID NO: 366) |
| BhCas12b | MATRSFILKIEPNEEVKKGLWKTHEVLNHGIAYYMNILKLIRQEAIYEHHEQDPKNPKKVSKAEIQAELWD |
| Bacillus | FVLKMQKCNSFTHEVDKDEVFNILRELYEELVPSSVEKKGEANQLSNKFLYPLVDPNSQSGKGTASSGRKP |
| hisashii | RWYNLKIAGDPSWEEEKKKWEEDKKKDPLAKILGKLAEYGLIPLFIPYTDSNEPIVKEIKWMEKSRNQSVR |
| Ref Seq. | RLDKDMFIQALERFLSWESWNLKVKEEYEKVEKEYKTLEERIKEDIQALKALEQYEKERQEQLLRDTLNTN |
| WP_095142515.1 | EYRLSKRGLRGWREIIQKWLKMDENEPSEKYLEVFKDYQRKHPREAGDYSVYEFLSKKENHFIWRNHPEYP |
| | YLYATFCEIDKKKKDAKQQATFTLADPINHPLWVRFEERSGSNLNKYRILTEQLHTEKLKKKLTVQLDRLI |
| | YPTESGGWEEKGKVDIVLLPSRQFYNQIFLDIEEKGKHAFTYKDESIKFPLKGTLGGARVQFDRDHLRRYP |
| | HKVESGNVGRIYFNMTVNIEPTESPVSKSLKIHRDDFPKVVNFKPKELTEWIKDSKGKKLKSGIESLEIGL |
| | RVMSIDLGQRQAAAASIFEVVDQKPDIEGKLFFPIKGTELYAVHRASFNIKLPGETLVKSREVLRKAREDN |
| | LKLMNQKLNFLRNVLHFQQFEDITEREKRVTKWISRQENSDVPLVYQDELIQIRELMYKPYKDWVAFLKQL |
| | HKRLEVEIGKEVKHWRKSLSDGRKGLYGISLKNIDEIDRTRKFLLRWSLRPTEPGEVRRLEPGQRFAIDQL |
| | NHLNALKEDRLKKMANTIIMHALGYCYDVRKKKWQAKNPACQIILFEDLSNYNPYEERSRFENSKLMKWSR |
| | REIPRQVALQGEIYGLQVGEVGAQFSSRFHAKTGSPGIRCSVVTKEKLQDNRFFKNLQREGRLTLDKIAVL |
| | KEGDLYPDKGGEKFISLSKDRKCVTTHADINAAQNLQKRFWTRTHGFYKVYCKAYQVDGQTVYIPESKDQK |
| | QKIIEEFGEGYFILKDGVYEWVNAGKLKIKKGSSKQSSSELVDSDILKDSFDLASELKGEKLMLYRDPSGN |
| | VFPSDKWMAAGVFFGKLERILISKLTNQYSISTIEDDSSKQSM (SEQ ID NO: 367) |
| ThCas12b | MSEKTTQRAYTLRLNRASGECAVCQNNSCDCWHDALWATHKAVNRGAKAFGDWLLTLRGGLCHTLVEMEVP |
| Thermomonas | AKGNNPPQRPTDQERRDRRVLLALSWLSVEDEHGAPKEFIVATGRDSADDRAKKVEEKLREILEKRDFQEH |
| hydrothermalis | EIDAWLQDCGPSLKAHIREDAVWVNRRALFDAAVERIKTLTWEEAWDFLEPFFGTQYFAGIGDGKDKDDAE |
| Ref Seq. | GPARQGEKAKDLVQKAGQWLSARFGIGTGADFMSMAEAYEKIAKWASQAQNGDNGKATIEKLACALRPSEP |
| WP_072754838 | PTLDTVLKCISGPGHKSATREYLKTLDKKSTVTQEDLNQLRKLADEDARNCRKKVGKKGKKPWADEVLKDV |
| | ENSCELTYLQDNSPARHREFSVMLDHAARRVSMAHSWIKKAEQRRRQFESDAQKLKNLQERAPSAVEWLDR |
| | FCESRSMTTGANTGSGYRIRKRAIEGWSYVVQAWAEASCDTEDKRIAAARKVQADPEIEKFGDIQLFEALA |
| | ADEAICVWRDQEGTQNPSILIDYVTGKTAEHNQKRFKVPAYRHPDELRHPVFCDFGNSRWSIQFAIHKEIR |
| | DRDKGAKQDTRQLQNRHGLKMRLWNGRSMTDVNLHWSSKRLTADLALDQNPNPNPTEVTRADRLGRAASSA |
| | FDHVKIKNVFNEKEWNGRLQAPRAELDRIAKLEEQGKTEQAEKLRKRLRWYVSFSPCLSPSGPFIVYAGQH |
| | NIQPKRSGQYAPHAQANKGRARLAQLILSRLPDLRILSVDLGHRFAAACAVWETLSSDAFRREIQGLNVLA |
| | GGSGEGDLFLHVEMTGDDGKRRTVVYRRIGPDQLLDNTPHPAPWARLDRQFLIKLQGEDEGVREASNEELW |
| | TVHKLEVEVGRTVPLIDRMVRSGFGKTEKQKERLKKLRELGWISAMPNEPSAETDEKEGEIRSISRSVDEL |
| | MSSALGTLRLALKRHGNRARIAFAMTADYKPMPGGQKYYFHEAKEASKNDDETKRRDNQIEFLQDALSLWH |
| | DLFSSPDWEDNEAKKLWQNHIATLPNYQTPEEISAELKRVERNKKRKENRDKLRTAAKALAENDQLRQHLH |
| | DTWKERWESDDQQWKERLRSLKDWIFPRGKAEDNPSIRHVGGLSITRINTISGLYQILKAFKMRPEPDDLR |
| | KNIPQKGDDELENFNRRLLEARDRLREQRVKQLASRIIEAALGVGRIKIPKNGKLPKRPRTTVDTPCHAVV |
| | IESLKTYRPDDLRTRRENRQLMQWSSAKVRKYLKEGCELYGLHFLEVPANYTSRQCSRTGLPGIRCDDVPT |
| | GDFLKAPWWRRAINTAREKNGGDAKDRFLVDLYDHLNNLQSKGEALPATVRVPRQGGNLFIAGAQLDDTNK |
| | ERRAIQADLNAAANIGLRALLDPDWRGRWWYVPCKDGTSEPALDRIEGSTAFNDVRSLPTGDNSSRRAPRE |
| | IENLWRDPSGDSLESGTWSPTRAYWDTVQSRVIELLRRHAGLPTS (SEQ ID NO: 368) |
| LsCas12b | MSIRSFKLKLKTKSGVNAEQLRRGLWRTHQLINDGIAYYMNWLVLLRQEDLFIRNKETNEIEKRSKEEIQA |
| Laceyella | VLLERVHKQQQRNQWSGEVDEQTLLQALRQLYEEIVPSVIGKSGNASLKARFFLGPLVDPNNKTTKDVSKS |
| sacchari | GPTPKWKKMKDAGDPNWVQEYEKYMAERQTLVRLEEMGLIPLFPMYTDEVGDIHWLPQASGYTRTWDRDMF |
| WP_132221894.1 | QQAIERLLSWESWNRRVRERRAQFEKKTHDFASRFSESDVQWMNKLREYEAQQEKSLEENAFAPNEPYALT |
| | KKALRGWERVYHSWMRLDSAASEEAYWQEVATCQTAMRGEFGDPAIYQFLAQKENHDIWRGYPERVIDFAE |
| | LNHLQRELRRAKEDATFTLPDSVDHPLWVRYEAPGGTNIHGYDLVQDTKRNLTLILDKFILPDENGSWHEV |
| | KKVPFSLAKSKQFHRQVWLQEEQKQKKREVVFYDYSTNLPHLGTLAGAKLQWDRNFLNKRTQQQIEETGEI |
| | GKVFFNISVDVRPAVEVKNGRLQNGLGKALTVLTHPDGTKIVTGWKAEQLEKWVGESGRVSSLGLDSLSEG |
| | LRVMSIDLGQRTSATVSVFEITKEAPDNPYKFFYQLEGTEMFAVHQRSFLLALPGENPPQKIKQMREIRWK |
| | ERNRIKQQVDQLSAILRLHKKVNEDERIQAIDKLLQKVASWQLNEEIATAWNQALSQLYSKAKENDLQWNQ |
| | AIKNAHHQLEPVVGKQISLWRKDLSTGRQGIAGLSLWSIEELEATKKLLTRWSKRSREPGVVKRIERFETF |
| | AKQIQHHINQVKENRLKQLANLIVMTALGYKYDQEQKKWIEVYPACQVVLFENLRSYRFSFERSRRENKKL |
| | MEWSHRSIPKLVQMQGELFGLQVADVYAAYSSRYHGRTGAPGIRCHALTEADLRNETNIIHELIEAGFIKE |
| | EHRPYLQQGDLVPWSGGELFATLQKPYDNPRILTLHADINAAQNIQKRFWHPSMWFRVNCESVMEGEIVTY |
| | VPKNKTVHKKQGKTFRFVKVEGSDVYEWAKWSKNRNKNTFSSITERKPPSSMILFRDPSGTFFKEQEWVEQ |
| | KTFWGKVQSMIQAYMKKTIVQRMEE (SEQ ID NO: 369) |
| DtCas12b | MVLGRKDDTAELRRALWTTHEHVNLAVAEVERVLLRCRGRSYWTLDRRGDPVHVPESQVAEDALAMAREAQ |
| Dsulfonatronum | RRNGWPVVGEDEEILLALRYLYEQIVPSCLLDDLGKPLKGDAQKIGTNYAGPLFDSDTCRRDEGKDVACCG |
| thiodismutans | PFHEVAGKYLGALPEWATPISKQEFDGKDASHLRFKATGGDDAFFRVSIEKANAWYEDPANQDALKNKAYN |
| WP_031386437 | KDDWKKEKDKGISSWAVKYIQKQLQLGQDPRTEVRRKLWLELGLLPLFIPVFDKTMVGNLWNRLAVRLALA |
| | HLLSWESWNHRAVQDQALARAKRDELAALFLGMEDGFAGLREYELRRNESIKQHAFEPVDRPYVVSGRALR |
| | SWTRVREEWLRHGDTQESRKNICNRLQDRLRGKFGDPDVFHWLAEDGQEALWKERDCVTSFSLLNDADGLL |
| | EKRKGYALMTFADARLHPRWAMYEAPGGSNLRTYQIRKTENGLWADVVLLSPRNESAAVEEKTFNVRLAPS |
| | GQLSNVSFDQIQKGSKMVGRCRYQSANQQFEGLLGGAEILFDRKRIANEQHGATDLASKPGHVWFKLTLDV |
| | RPQAPQGWLDGKGRPALPPEAKHFKTALSNKSKFADQVRPGLRVLSVDLGVRSFAACSVFELVRGGPDQGT |
| | YFPAADGRTVDDPEKLWAKHERSFKITLPGENPSRKEEIARRAAMEELRSLNGDIRRLKAILRLSVLQEDD |
| | PRTEHLRLFMEAIVDDPAKSALNAELFKGFGDDRFRSTPDLWKQHCHFFHDKAEKVVAERFSRWRTETRPK |
| | SSSWQDWRERRGYAGGKSYWAVTYLEAVRGLILRWNMRGRTYGEVNRQDKKQFGTVASALLHHINQLKEDR |
| | IKTGADMIIQAARGFVPRKNGAGWVQVHEPCRLILFEDLARYRFRTDRSRRENSRLMRWSHREIVNEVGMQ |
| | GELYGLHVDTTEAGFSSRYLASSGAPGVRCRHLVEEDFHDGLPGMHLVGELDWLLPKDKDRTANEARRLLG |
| | GMVRPGMLVPWDGGELFATLNAASQLHVIHADINAAQNLQRRFWGRCGEAIRIVCNQLSVDGSTRYEMAKA |
| | PKARLLGALQQLKNGDAPFHLTSIPNSQKPENSYVMTPTNAGKKYRAGPGEKSSGEEDELALDIVEQAEEL |
| | AQGRKTFFRDPSGVFFAPDRWLPSEIYWSRIRRRIWQVTLERNSSGRQERAEMDEMPY |
| | (SEQ ID NO: 370) |

[0393] The base editors described herein may also comprise Cas12a/Cpf1 (dCpf1) variants that may be used as a guide nucleotide sequence-programmable DNA-binding protein domain. The Cas12a/Cpf1 protein has a RuvC-like endonuclease domain that is similar to the RuvC domain of Cas9 but does not have a HNH endonuclease domain, and the N-terminal of Cpf1 does not have the alfa-helical recognition lobe of Cas9. It was shown in Zetsche et al., Cell, 163, 759-771, 2015 (which is incorporated herein by reference) that, the RuvC-like domain of Cpf1 is responsible for cleaving both DNA strands and inactivation of the RuvC-like domain inactivates Cpf1 nuclease activity.

[0394] (h) Cas9 Equivalents with Expanded PAM Sequence

[0395] In addition to those described above, the napDNAbp can be a nucleic acid programmable DNA binding protein that does not require a canonical (NGG) PAM sequence. In some embodiments, the napDNAbp is an argonaute protein. One example of such a nucleic acid programmable DNA binding protein is an Argonaute protein from Natronobacterium gregoryi (NgAgo). NgAgo is an ssDNA-guided endonuclease. NgAgo binds 5′ phosphorylated ssDNA of ˜24 nucleotides (gDNA) to guide it to its target site and will make DNA double-strand breaks at the gDNA site. In contrast to Cas9, the NgAgo-gDNA system does not require a protospacer-adjacent motif (PAM). Using a nuclease inactive NgAgo (dNgAgo) can greatly expand the bases that may be targeted. The characterization and use of NgAgo have been described in Gao et al., Nat Biotechnol., 2016 July; 34(7):768-73. PubMed PMID: 27136078; Swarts et al., Nature. 507(7491) (2014):258-61; and Swarts et al., Nucleic Acids Res. 43(10) (2015):5120-9, each of which is incorporated herein by reference.

[0396] In some embodiments, the napDNAbp is a prokaryotic homolog of an Argonaute protein. Prokaryotic homologs of Argonaute proteins are known and have been described, for example, in Makarova K., et al., “Prokaryotic homologs of Argonaute proteins are predicted to function as key components of a novel system of defense against mobile genetic elements”, Biol Direct. 2009 Aug. 25; 4:29. doi: 10.1186/1745-6150-4-29, the entire contents of which is hereby incorporated by reference. In some embodiments, the napDNAbp is a Marinitoga piezophila Argunaute (MpAgo) protein. The CRISPR-associated Marinitoga piezophila Argunaute (MpAgo) protein cleaves single-stranded target sequences using 5′-phosphorylated guides. The 5′ guides are used by all known Argonautes. The crystal structure of an MpAgo-RNA complex shows a guide strand binding site comprising residues that block 5′ phosphate interactions. This data suggests the evolution of an Argonaute subclass with noncanonical specificity for a 5′-hydroxylated guide. See, e.g., Kaya et al., “A bacterial Argonaute with noncanonical guide RNA specificity”, Proc Natl Acad Sci USA. 2016 Apr. 12; 113(15):4057-62, the entire contents of which are hereby incorporated by reference). It should be appreciated that other argonaute proteins may be used, and are within the scope of this disclosure.

[0397] In some embodiments, the napDNAbp is a single effector of a microbial CRISPR-Cas system. Single effectors of microbial CRISPR-Cas systems include, without limitation, Cas9, Cpf1, C2c1, C2c2, and C2c3. Typically, microbial CRISPR-Cas systems are divided into Class 1 and Class 2 systems. Class 1 systems have multisubunit effector complexes, while Class 2 systems have a single protein effector. For example, Cas9 and Cpf1 are Class 2 effectors. In addition to Cas9 and Cpf1, three distinct Class 2 CRISPR-Cas systems (C2c1, C2c2, and C2c3) have been described by Shmakov et al., “Discovery and Functional Characterization of Diverse Class 2 CRISPR Cas Systems”, Mol. Cell, 2015 Nov. 5; 60(3): 385-397, the entire contents of which is hereby incorporated by reference. Effectors of two of the systems, C2c1 and C2c3, contain RuvC-like endonuclease domains related to Cpf1. A third system, C2c2 contains an effector with two predicated HEPN RNase domains. Production of mature CRISPR RNA is tracrRNA-independent, unlike production of CRISPR RNA by C2c1. C2c1 depends on both CRISPR RNA and tracrRNA for DNA cleavage. Bacterial C2c2 has been shown to possess a unique RNase activity for CRISPR RNA maturation distinct from its RNA-activated single-stranded RNA degradation activity. These RNase functions are different from each other and from the CRISPR RNA-processing behavior of Cpf1. See, e.g., East-Seletsky, et al., “Two distinct RNase activities of CRISPR-C2c2 enable guide-RNA processing and RNA detection”, Nature, 2016 Oct. 13; 538(7624):270-273, the entire contents of which are hereby incorporated by reference. In vitro biochemical analysis of C2c2 in Leptotrichia shahii has shown that C2c2 is guided by a single CRISPR RNA and can be programed to cleave ssRNA targets carrying complementary protospacers. Catalytic residues in the two conserved HEPN domains mediate cleavage. Mutations in the catalytic residues generate catalytically inactive RNA-binding proteins. See e.g., Abudayyeh et al., “C2c2 is a single-component programmable RNA-guided RNA-targeting CRISPR effector”, Science, 2016 Aug. 5; 353(6299), the entire contents of which are hereby incorporated by reference.

[0398] The crystal structure of Alicyclobaccillus acidoterrastris C2c1 (AacC2c1) has been reported in complex with a chimeric single-molecule guide RNA (sgRNA). See e.g., Liu et al., “C2c1-sgRNA Complex Structure Reveals RNA-Guided DNA Cleavage Mechanism”, Mol. Cell, 2017 Jan. 19; 65(2):310-322, the entire contents of which are hereby incorporated by reference. The crystal structure has also been reported in Alicyclobacillus acidoterrestris C2c1 bound to target DNAs as ternary complexes. See e.g., Yang et al., “PAM-dependent Target DNA Recognition and Cleavage by C2C1 CRISPR-Cas endonuclease”, Cell, 2016 Dec. 15; 167(7):1814-1828, the entire contents of which are hereby incorporated by reference. Catalytically competent conformations of AacC2c1, both with target and non-target DNA strands, have been captured independently positioned within a single RuvC catalytic pocket, with C2c1-mediated cleavage resulting in a staggered seven-nucleotide break of target DNA. Structural comparisons between C2c1 ternary complexes and previously identified Cas9 and Cpf1 counterparts demonstrate the diversity of mechanisms used by CRISPR-Cas9 systems.

[0399] In some embodiments, the napDNAbp may be a C2c1, a C2c2, or a C2c3 protein. In some embodiments, the napDNAbp is a C2c1 protein. In some embodiments, the napDNAbp is a C2c2 protein. In some embodiments, the napDNAbp is a C2c3 protein. In some embodiments, the napDNAbp comprises an amino acid sequence that is at least 85%, at least 90%, at least 91%, at least 92%, at least 93%, at least 94%, at least 95%, at least 96%, at least 97%, at least 98%, at least 99%, or at least 99.5% identical to a naturally-occurring C2c1, C2c2, or C2c3 protein. In some embodiments, the napDNAbp is a naturally-occurring C2c1, C2c2, or C2c3 protein.

[0400] Some aspects of the disclosure provide Cas9 domains that have different PAM specificities. Typically, Cas9 proteins, such as Cas9 from S. pyogenes (spCas9), require a canonical NGG PAM sequence to bind a particular nucleic acid region. This may limit the ability to edit desired bases within a genome. In some embodiments, the base editing fusion proteins provided herein may need to be placed at a precise location, for example where a target base is placed within a 4 base region (e.g., a “editing window”), which is approximately 15 bases upstream of the PAM. See Komor, A. C., et al., “Programmable editing of a target base in genomic DNA without double-stranded DNA cleavage” Nature 533, 420-424 (2016), the entire contents of which are hereby incorporated by reference. Accordingly, in some embodiments, any of the fusion proteins provided herein may contain a Cas9 domain that is capable of binding a nucleotide sequence that does not contain a canonical (e.g., NGG) PAM sequence. Cas9 domains that bind to non-canonical PAM sequences have been described in the art and would be apparent to the skilled artisan. For example, Cas9 domains that bind non-canonical PAM sequences have been described in Kleinstiver, B. P., et al., “Engineered CRISPR-Cas9 nucleases with altered PAM specificities” Nature 523, 481-485 (2015); and Kleinstiver, B. P., et al., “Broadening the targeting range of Staphylococcus aureus CRISPR-Cas9 by modifying PAM recognition” Nature Biotechnology 33, 1293-1298 (2015); the entire contents of each are hereby incorporated by reference.

[0401] For example, a napDNAbp domain with altered PAM specificity, such as a domain with at least 80%, at least 85%, at least 90%, at least 95%, or at least 99% sequence identity with wild type Francisella novicida Cpf1 (SEQ ID NO: 371) (D917, E1006, and D1255), which has the following amino acid sequence:

(SEQ ID NO: 371)
MSIYQEFVNKYSLSKTLRFELIPQGKTLENIKARGLILDDEKRAKDYKKA
KQIIDKYHQFFIEEILSSVCISEDLLQNYSDVYFKLKKSDDDNLQKDFKS
AKDTIKKQISEYIKDSEKFKNLFNQNLIDAKKGQESDLILWLKQSKDNGI
ELFKANSDITDIDEALEIIKSFKGWTTYFKGFHENRKNVYSSNDIPTSII
YRIVDDNLPKFLENKAKYESLKDKAPEAINYEQIKKDLAEELTFDIDYKT
SEVNQRVFSLDEVFEIANFNNYLNQSGITKFNTIIGGKFVNGENTKRKGI
NEYINLYSQQINDKTLKKYKMSVLFKQILSDTESKSFVIDKLEDDSDVVT
TMQSFYEQIAAFKTVEEKSIKETLSLLFDDLKAQKLDLSKIYFKNDKSLT
DLSQQVFDDYSVIGTAVLEYITQQIAPKNLDNPSKKEQELIAKKTEKAKY
LSLETIKLALEEFNKHRDIDKQCRFEEILANFAAIPMIFDEIAQNKDNLA
QISIKYQNQGKKDLLQASAEDDVKAIKDLLDQTNNLLHKLKIFHISQSED
KANILDKDEHFYLVFEECYFELANIVPLYNKIRNYITQKPYSDEKFKLNF
ENSTLANGWDKNKEPDNTAILFIKDDKYYLGVMNKKNNKIFDDKAIKENK
GEGYKKIVYKLLPGANKMLPKVFFSAKSIKFYNPSEDILRIRNHSTHTKN
GSPQKGYEKFEFNIEDCRKFIDFYKQSISKHPEWKDFGFRFSDTQRYNSI
DEFYREVENQGYKLTFENISESYIDSVVNQGKLYLFQIYNKDFSAYSKGR
PNLHTLYWKALFDERNLQDVVYKLNGEAELFYRKQSIPKKITHPAKEAIA
NKNKDNPKKESVFEYDLIKDKRFTEDKFFFHCPITINFKSSGANKFNDEI
NLLLKEKANDVHILSIDRGERHLAYYTLVDGKGNIIKQDTFNIIGNDRMK
TNYHDKLAAIEKDRDSARKDWKKINNIKEMKEGYLSQVVHEIAKLVIEYN
AIVVFEDLNFGFKRGRFKVEKQVYQKLEKMLIEKLNYLVFKDNEFDKTGG
VLRAYQLTAPFETFKKMGKQTGIIYYVPAGFTSKICPVTGFVNQLYPKYE
SVSKSQEFFSKFDKICYNLDKGYFEFSFDYKNFGDKAAKGKWTIASFGSR
LINFRNSDKNHNWDTREVYPTKELEKLLKDYSIEYGHGECIKAAICGESD
KKFFAKLTSVLNTILQMRNSKTGTELDYLISPVADVNGNFFDSRQAPKNM
PQDADANGAYHIGLKGLMLLGRIKNNQEGKKLNLVIKNEEYFEFVQNRNN

[0402] An additional napDNAbp domain with altered PAM specificity, such as a domain having at least 80%, at least 85%, at least 90%, at least 95%, or at least 99% sequence identity with wild type Geobacillus thermodenitrificans Cas9 (SEQ ID NO: 372), which has the following amino acid sequence:

(SEQ ID NO: 372)
MKYKIGLDIGITSIGWAVINLDIPRIEDLGVRIFDRAENPKTGESLALPR
RLARSARRRLRRRKHRLERIRRLFVREGILTKEELNKLFEKKHEIDVWQL
RVEALDRKLNNDELARILLHLAKRRGFRSNRKSERTNKENSTMLKHIEEN
QSILSSYRTVAEMVVKDPKFSLHKRNKEDNYTNTVARDDLEREIKLIFAK
QREYGNIVCTEAFEHEYISIWASQRPFASKDDIEKKVGFCTFEPKEKRAP
KATYTFQSFTVWEHINKLRLVSPGGIRALTDDERRLIYKQAFHKNKITFH
DVRTLLNLPDDTRFKGLLYDRNTTLKENEKVRFLELGAYHKIRKAIDSVY
GKGAAKSFRPIDFDTFGYALTMFKDDTDIRSYLRNEYEQNGKRMENLADK
VYDEELIEELLNLSFSKFGHLSLKALRNILPYMEQGEVYSTACERAGYTF
TGPKKKQKTVLLPNIPPIANPVVMRALTQARKVVNAIIKKYGSPVSIHIE
LARELSQSFDERRKMQKEQEGNRKKNETAIRQLVEYGLTLNPTGLDIVKF
KLWSEQNGKCAYSLQPIEIERLLEPGYTEVDHVIPYSRSLDDSYTNKVLV
LTKENREKGNRTPAEYLGLGSERWQQFETFVLTNKQFSKKKRDRLLRLHY
DENEENEFKNRNLNDTRYISRFLANFIREHLKFADSDDKQKVYTVNGRIT
AHLRSRWNFNKNREESNLHHAVDAAIVACTTPSDIARVTAFYQRREQNKE
LSKKTDPQFPQPWPHFADELQARLSKNPKESIKALNLGNYDNEKLESLQP
VFVSRMPKRSITGAAHQETLRRYIGIDERSGKIQTVVKKKLSEIQLDKTG
HFPMYGKESDPRTYEAIRQRLLEHNNDPKKAFQEPLYKPKKNGELGPIIR
TIKIIDTTNQVIPLNDGKTVAYNSNIVRVDVFEKDGKYYCVPIYTIDMMK
GILPNKAIEPNKPYSEWKEMTEDYTFRFSLYPNDLIRIEFPREKTIKTAV
GEEIKIKDLFAYYQTIDSSNGGLSLVSHDNNFSLRSIGSRTLKRFEKYQV
DVLGNIYKVRGEKRVGVASSSHSKAGETIRPL

[0403] In some embodiments, the nucleic acid programmable DNA binding protein (napDNAbp) is a nucleic acid programmable DNA binding protein that does not require a canonical (NGG) PAM sequence. In some embodiments, the napDNAbp is an argonaute protein. One example of such a nucleic acid programmable DNA binding protein is an Argonaute protein from Natronobacterium gregoryi (NgAgo). NgAgo is an ssDNA-guided endonuclease. NgAgo binds 5′ phosphorylated ssDNA of ˜24 nucleotides (gDNA) to guide it to its target site and will make DNA double-strand breaks at the gDNA site. In contrast to Cas9, the NgAgo-gDNA system does not require a protospacer-adjacent motif (PAM). Using a nuclease inactive NgAgo (dNgAgo) can greatly expand the bases that may be targeted. The characterization and use of NgAgo have been described in Gao et al., Nat Biotechnol., 34(7): 768-73 (2016), PubMed PMID: 27136078; Swarts et al., Nature, 507(7491): 258-61 (2014); and Swarts et al., Nucleic Acids Res. 43(10) (2015): 5120-9, each of which is incorporated herein by reference. The sequence of Natronobacterium gregoryi Argonaute is provided in SEQ ID NO: 373.

[0404] The disclosed fusion proteins may comprise a napDNAbp domain having at least 80%, at least 85%, at least 90%, at least 95%, or at least 99% sequence identity with wild type Natronobacterium gregoryi Argonaute (SEQ ID NO: 373), which has the following amino acid sequence:

(SEQ ID NO: 373)
MTVIDLDSTTTADELTSGHTYDISVTLTGVYDNTDEQHPRMSLAFEQDNG
ERRYITLWKNTTPKDVFTYDYATGSTYIFTNIDYEVKDGYENLTATYQTT
VENATAQEVGTTDEDETFAGGEPLDHHLDDALNETPDDAETESDSGHVMT
SFASRDQLPENTLHTYTLTATDGAKTDTEYARRTLAYTVRQELYTDHDAA
PVATDGLMLLTPEPLGETPLDLDCGVRVEADETRTLDYTTAKDRLLAREL
VEEGLKRSLWDDYLVRGIDEVLSKEPVLTCDEFDLHERYDLSVEVGHSGR
AYLHINFRHRFVPKLTLADIDDDNIYPGLRVKTTYRPRRGHIVWGLRDEC
ATDSLNTLGNQSVVAYHRNNQTPINTDLLDAIEAADRRVVETRRQGHGDD
AVSFPQELLAVEPNTHQIKQFASDGFHQQARSKTRLSASRCSEKAQAFAE
RLDPVRLNGSTVEFSSEFFTGNNEQQLRLLYENGESVLTFRDGARGAHPD
ETFSKGIVNPPESFEVAVVLPEQQADTCKAQWDTMADLLNQAGAPPTRSE
TVQYDAFSSPESISLNVAGAIDPSEVDAAFVVLPPDQEGFADLASPTETY
DELKKALANMGIYSQMAYFDRFRDAKIFYTRNVALGLLAAAGGVAFTTEH
AMPGDADMFIGIDVSRSYPEDGASGQINIAATATAVYKDGTILGHSSTRP
QLGEKLQSTDVRDIMKNAILGYQQVTGESPTHIVIHRDGFMNEDLDPATE
FLNEQGVEYDIVEIRKQPQTRLLAVSDVQYDTPVKSIAAINQNEPRATVA
TFGAPEYLATRDGGGLPRPIQIERVAGETDIETLTRQVYLLSQSHIQVHN
STARLPITTAYADQASTHATKGYLVQTGAFESNVGFL

[0405] It should be appreciated that any of the amino acid mutations described herein, (e.g., A262T) from a first amino acid residue (e.g., A) to a second amino acid residue (e.g., T) may also include mutations from the first amino acid residue to an amino acid residue that is similar to (e.g., conserved) the second amino acid residue. For example, mutation of an amino acid with a hydrophobic side chain (e.g., alanine, valine, isoleucine, leucine, methionine, phenylalanine, tyrosine, or tryptophan) may be a mutation to a second amino acid with a different hydrophobic side chain (e.g., alanine, valine, isoleucine, leucine, methionine, phenylalanine, tyrosine, or tryptophan). For example, a mutation of an alanine to a threonine (e.g., a A262T mutation) may also be a mutation from an alanine to an amino acid that is similar in size and chemical properties to a threonine, for example, serine. As another example, mutation of an amino acid with a positively charged side chain (e.g., arginine, histidine, or lysine) may be a mutation to a second amino acid with a different positively charged side chain (e.g., arginine, histidine, or lysine). As another example, mutation of an amino acid with a polar side chain (e.g., serine, threonine, asparagine, or glutamine) may be a mutation to a second amino acid with a different polar side chain (e.g., serine, threonine, asparagine, or glutamine). Additional similar amino acid pairs include, but are not limited to, the following: phenylalanine and tyrosine; asparagine and glutamine; methionine and cysteine; aspartic acid and glutamic acid; and arginine and lysine. The skilled artisan would recognize that such conservative amino acid substitutions will likely have minor effects on protein structure and are likely to be well tolerated without compromising function. In some embodiments, any amino of the amino acid mutations provided herein from one amino acid to a threonine may be an amino acid mutation to a serine. In some embodiments, any amino of the amino acid mutations provided herein from one amino acid to an arginine may be an amino acid mutation to a lysine. In some embodiments, any amino of the amino acid mutations provided herein from one amino acid to an isoleucine, may be an amino acid mutation to an alanine, valine, methionine, or leucine. In some embodiments, any amino of the amino acid mutations provided herein from one amino acid to a lysine may be an amino acid mutation to an arginine. In some embodiments, any amino of the amino acid mutations provided herein from one amino acid to an aspartic acid may be an amino acid mutation to a glutamic acid or asparagine. In some embodiments, any amino of the amino acid mutations provided herein from one amino acid to a valine may be an amino acid mutation to an alanine, isoleucine, methionine, or leucine. In some embodiments, any amino of the amino acid mutations provided herein from one amino acid to a glycine may be an amino acid mutation to an alanine. It should be appreciated, however, that additional conserved amino acid residues would be recognized by the skilled artisan and any of the amino acid mutations to other conserved amino acid residues are also within the scope of this disclosure.

[0406] In some embodiments, the Cas9 protein comprises a combination of mutations that exhibit activity on a target sequence comprising a 5′-NAA-3′ PAM sequence at its 3′-end. In some embodiments, the combinations of mutations are present in any one of the clones listed in Table 1. In some embodiments, the combinations of mutations are conservative mutations of the clones listed in Table 1. In some embodiments, the Cas9 protein comprises the combination of mutations of any one of the Cas9 clones listed in Table 1.

TABLE 1
NAA PAM Clones
Mutations from wild-type SpCas9 (e.g., SEQ ID NO: 1)

D177N, K218R, D6140, D11350, P1137S, E1219V, A1320V, A1323D, R1333K
D1770, K218R, D614N, D1135N, E1219V, Q1221H, H1264Y, A1320V, R1333K
A10T, I322V, S409I, E427G, G715C, D1135N, E1219V, Q1221H, H1264Y, A1320V, R1333K
A367T, K710E, R1114G, D1135N, P1137S, E1219V, Q1221H, H1264Y, A1320V, R1333K
A10T, I322V, S409I, E427G, R753G, D861N, D1135N, K1188R, E1219V, Q1221H, H1264H,
A1320V, R1333K
A10T, I322V, S409I, E427G, R654L, V7431, R753G, M1021T, D11350, D1180G, K1211R,
E1219V, Q1221H, H1264Y, A1320V, R1333K
A10T, I322V, S409I, E427G, V743I, R753G, E762G, D1135N, D1180G, K1211R, E1219V,
Q1221H, H1264Y, A1320V, R1333K
A10T, I322V, S409I, E427G, R753G, D1135N, D1180G, K1211R, E1219V, Q1221H, H1264Y,
S1274R, A1320V, R1333K
A10T, I322V, S409I, E427G, A589S, R753G, D1135N, E1219V, Q1221H, H1264H, A1320V,
R1333K
A10T, I322V, S409I, E427G, R753G, E757K, G865G, D1135N, E1219V, Q1221H, H1264Y,
A1320V, R1333K
A10T, I322V, S409I, E427G, R654L, R753G, E757K, D1135H, E1219V, Q1221H, H1264Y,
A1320V, R1333K
A10T, I322V, S409I, E427G, K599R, M631A, R654L, K673E, V743I, R753G, N758H, E762G,
D1135N, D1180G, E1219V, Q1221H, Q1256R, H1264Y, A1320V, A1323D, R1333K
A10T, I322V, S409I, E427G, R654L, K673E, V743I, R753G, E762G, N869S, N1054D, R1114G,
D1135N, D1180G, E1219V, Q1221H, H1264Y, A1320V, A1323D, R1333K
A10T, I322V, S409I, E427G, R654L, L727I, V743I, R753G, E762G, R8595, N946D, F1134L,
D1135N, D1180G, E1219V, Q1221H, H1264Y, N1317T, A1320V, A1323D, R1333K
A10T, I322V, S409I, E427G, R654L, K673E, V743I, R753G, E762G, N803S, N869S, Y1016D,
G1077D, R1114G, F1134L, D1135N, D1180G, E1219V, Q1221H, H1264Y, V1290G, L1318S,
A1320V, A1323D, R1333K
A10T, I322V, S409I, E427G, R654L, K673E, V743I, R753G, E762G, N803S, N869S, Y1016D,
G1077D, R1114G, F1134L, D1135N, K1151E, D1180G, E1219V, Q1221H, H1264Y, V1290G,
L1318S, A1320V, R1333K
A10T, I322V, S409I, E427G, R654L, K673E, V743I, R753G, E762G, N803S, N869S, Y1016D,
G1077D, R1114G, F1134L, D1135N, D1180G, E1219V, Q1221H, H1264Y, V1290G, L1318S,
A1320V, A1323D, R1333K
A10T, I322V, S409I, E427G, R654L, K673E, F693L, V743I, R753G, E762G, N803S, N869S,
L921P, Y10160, G1077D, F1080S, R1114G, D1135N, D1180G, E1219V, Q1221H, H1264Y,
L1318S, A1320V, A1323D, R1333K
A10T, I322V, S409I, E427G, E630K, R654L, K673E, V743I, R753G, E762G, Q768H, N803S,
N869S, Y1016D, G1077D, R1114G, F1134L, D1135N, D1180G, E1219V, Q1221H, H1264Y,
L1318S, A1320V, R1333K
A10T, I322V, S409I, E427G, R654L, K673E, F693L, V743I, R753G, E762G, Q768H, N803S,
N869S, Y1016D, G1077D, R1114G, F1134L, D1135N, D1180G, E1219V, Q1221H, G1223S,
H1264Y, L1318S, A1320V, R1333K
A10T, I322V, S409I, E427G, R654L, K673E, F693L, V743I, R753G, E762G, N803S, N869S,
L921P, Y1016D, G1077D, F1801S, R1114G, D1135N, D1180G, E1219V, Q1221H, H1264Y,
L1318S, A1320V, A1323D, R1333K
A10T, I322V, S409I, E427G, R654L, V7431, R753G, M1021T, D1135N, D1180G, K1211R,
E1219V, Q1221H, H1264Y, A1320V, R1333K
A10T, I322V, S409I, E427G, R654L, K673E, V743I, R753G, E762G, M673I, N803S, N869S,
G1077D, R1114G, D1135N, V1139A, D1180G, E1219V, Q1221H, A1320V, R1333K
A10T, I322V, S409I, E427G, R654L, K673E, V743I, R753G, E762G, N803S, N869S, R1114G,
D1135N, E1219V, Q1221H, A1320V, R1333K

[0407] In some embodiments, the Cas9 protein comprises an amino acid sequence that is at least 80% identical to the amino acid sequence of a Cas9 protein as provided by any one of the variants of Table 1. In some embodiments, the Cas9 protein comprises an amino acid sequence that is at least 85%, at least 90%, at least 92%, at least 95%, at least 96%, at least 97%, at least 98%, at least 99%, or at least 99.5% identical to the amino acid sequence of a Cas9 protein as provided by any one of the variants of Table 1.

[0408] In some embodiments, the Cas9 protein exhibits an increased activity on a target sequence that does not comprise the canonical PAM (5′-NGG-3′) at its 3′ end as compared to Streptococcus pyogenes Cas9 as provided by SEQ ID NO: 1. In some embodiments, the Cas9 protein exhibits an activity on a target sequence having a 3′ end that is not directly adjacent to the canonical PAM sequence (5′-NGG-3′) that is at least 5-fold increased as compared to the activity of Streptococcus pyogenes Cas9 as provided by SEQ ID NO: 74 on the same target sequence. In some embodiments, the Cas9 protein exhibits an activity on a target sequence that is not directly adjacent to the canonical PAM sequence (5′-NGG-3′) that is at least 10-fold, at least 50-fold, at least 100-fold, at least 500-fold, at least 1,000-fold, at least 5,000-fold, at least 10,000-fold, at least 50,000-fold, at least 100,000-fold, at least 500,000-fold, or at least 1,000,000-fold increased as compared to the activity of Streptococcus pyogenes as provided by SEQ ID NO: 1 on the same target sequence. In some embodiments, the 3′ end of the target sequence is directly adjacent to an AAA, GAA, CAA, or TAA sequence. In some embodiments, the Cas9 protein comprises a combination of mutations that exhibit activity on a target sequence comprising a 5′-NAC-3′ PAM sequence at its 3′-end.

[0409] In some embodiments, the combinations of mutations are present in any one of the clones listed in Table 2. In some embodiments, the combinations of mutations are conservative mutations of the clones listed in Table 2. In some embodiments, the Cas9 protein comprises the combination of mutations of any one of the Cas9 clones listed in Table 2.

TABLE 2
NAC PAM Clones
MUTATIONS FROM WILD-TYPE SPCAS9 (E.G., SEQ ID NO: 1)

T472I, R753G, K890E, D1332N, R1335Q, T1337N
I1057S, 01135N, P1301S, R1335Q, T1337N
T472I, R753G, D1332N, R1335Q, T1337N
D1135N, E1219V, D1332N, R1335Q, T1337N
T472I, R753G, K890E, D1332N, R1335Q, T1337N
I1057S, D1135N, P1301S, R1335Q, T1337N
T472I, R753G, D1332N, R1335Q, T1337N
T472I, R753G, Q771H, D1332N, R1335Q, T1337N
E627K, T638P, K652T, R753G, N803S, K959N, R1114G, D1135N, E1219V, D1332N, R1335Q,
T1337N
E627K, T638P, K652T, R753G, N803S, K959N, R1114G, D1135N, K1156E, E1219V, D1332N,
R1335Q, T1337N
E627K, T638P, V647I, R753G, N803S, K959N, G1030R, I1055E, R1114G, D1135N, E1219V,
D1332N, R1335Q, T1337N
E627K, E630G, T638P, V647A, G687R, N767D, N803S, K959N, R1114G, D1135N, E1219V,
D1332G, R1335Q, T1337N
E627K, T638P, R753G, N803S, K959N, R1114G, 01135N, E1219V, N1266H, 01332N, R1335Q,
T1337N
E627K, T638P, R753G, N803S, K959N, I1057T, R1114G, D1135N, E1219V, D1332N, R1335Q,
T1337N
E627K, T638P, R753G, N8038, K959N, R1114G, D1135N, E1219V, D1332N, R1335Q, T1337N
E627K, M631I, T638P, R753G, N803S, K959N, Y1036H, R1114G, D1135N, E1219V, D1251G,
D1332G, R1335Q, T1337N
E627K, T638P, R753G, N8038, V875I, K959N, Y1016C, R1114G, D1135N, E1219V, D1251G,
D1332G, R1335Q, T1337N, I1348V
K608R, E627K, T638P, V647I, R654L, R753G, N8038, T804A, K848N, V922A, K959N, R1114G,
D1135N, E1219V, D1332N, R1335Q, T1337N
K608R, E627K, T638P, V647I, R753G, N8038, V922A, K959N, K1014N, V1015A, R1114G,
D1135N, K1156N, E1219V, N1252D, D1332N, R1335Q, T1337N
K608R, E627K, R629G, T638P, V647I, A711T, R753G, K775R, K789E, N8038, K959N, V1015A,
Y1036H, R1114G, D1135N, E1219V, N1286H, D1332N, R1335Q, T1337N
K608R, E627K, T638P, V647I, T740A, R753G, N8038, K948E, K959N, Y10168, R1114G,
D1135N, E1219V, N1286H, D1332N, R1335Q, T1337N
K608R, E627K, T638P, V647I, T740A, N803S, K948E, K959N, Y10168, R1114G, D1135N,
E1219V, N1286H, D1332N, R1335Q, T1337N
I670S, K608R, E627K, E630G, T638P, V647I, R653K, R753G, I795L, K797N, N8038, K866R,
K890N, K959N, Y1016C, R1114G, D1135N, E1219V, D1332N, R1335Q, T1337N
K608R, E627K, T638P, V647I, T740A, G752R, R753G, K797N, N803S, K948E, K959N, V1015A,
Y10168, R1114G, D1135N, E1219V, N1266H, D1332N, R1335Q, T1337N
I570T, A589V, K608R, E627K, T638P, V647I, R654L, Q716R, R753G, N8038, K948E, K959N,
Y10168, R1114G, D1135N, E1207G, E1219V, N12340, D1332N, R1335Q, T1337N
K608R, E627K, R629G, T638P, V647I, R654L, Q740R, R753G, N803S, K959N, N990S, T995S,
V1015A, Y1036D, R1114G, D1135N, E1207G, E1219V, N12340, N1266H, D1332N, R1335Q,
T1337N
I562F, V565D, I570T, K608R, L625S, E627K, T638P, V647I, R654I, G752R, R753G, N803S,
N808D, K959N, M1021L, R1114G, D1135N, N1177S, N1234D, D1332N, R1335Q, T1337N
I562F, I570T, K608R, E627K, T638P, V647I, R753G, E790A, N803S, K959N, V1015A, Y1036H,
R1114G, D1135N, D1180E, A1184T, E1219V, D1332N, R1335Q, T1337N
I570T, K608R, E627K, T638P, V647I, R654H, R753G, E790A, N803S, K959N, V1015A, R1114G,
D1127A, D1135N, E1219V, D1332N, R1335Q, T1337N
I570T, K608R, L625S, E627K, T638P, V647I, R6541, T703P, R753G, N803S, N808D, K959N,
M1021L, R1114G, D1135N, E1219V, D1332N, R1335Q, T1337N
1570S, K608R, E627K, E630G, T638P, V647I, R653K, R753G, I795L, N803S, K866R, K890N,
K959N, Y1016C, R1114G, D1135N, E1219V, D1332N, R1335Q, T1337N
I570T, K608R, E627K, T638P, V647I, R654H, R753G, E790A, N803S, K959N, V1016A, R1114G,
D1135N, E1219V, K1246E, D1332N, R1335Q, T1337N
K608R, E627K, T638P, V6471, R654L, K673E, R753G, E790A, N803S, K948E, K959N, R1114G,
D1127G, D1135N, D1180E, E1219V, N1286H, D1332N, R1335Q, T1337N
K608R, L625S, E627K, T638P, V647I, R654I, I670T, R753G, N803S, N808D, K959N, M1021L,
R1114G, D1135N, E1219V, N1286H, D1332N, R1335Q, T1337N
E627K, M631V, T638P, V647I, K710E, R753G, N803S, N808D, K948E, M1021L, R1114G,
D1135N, E1219V, D1332N, R1335Q, T1337N, S1338T, H1349R

[0410] In some embodiments, the Cas9 protein comprises an amino acid sequence that is at least 80% identical to the amino acid sequence of a Cas9 protein as provided by any one of the variants of Table 2. In some embodiments, the Cas9 protein comprises an amino acid sequence that is at least 85%, at least 90%, at least 92%, at least 95%, at least 96%, at least 97%, at least 98%, at least 99%, or at least 99.5% identical to the amino acid sequence of a Cas9 protein as provided by any one of the variants of Table 2.

[0411] In some embodiments, the Cas9 protein exhibits an increased activity on a target sequence that does not comprise the canonical PAM (5′-NGG-3′) at its 3′ end as compared to Streptococcus pyogenes Cas9 as provided by SEQ ID NO: 1. In some embodiments, the Cas9 protein exhibits an activity on a target sequence having a 3′ end that is not directly adjacent to the canonical PAM sequence (5′-NGG-3′) that is at least 5-fold increased as compared to the activity of Streptococcus pyogenes Cas9 as provided by SEQ ID NO: 1 on the same target sequence. In some embodiments, the Cas9 protein exhibits an activity on a target sequence that is not directly adjacent to the canonical PAM sequence (5′-NGG-3′) that is at least 10-fold, at least 50-fold, at least 100-fold, at least 500-fold, at least 1,000-fold, at least 5,000-fold, at least 10,000-fold, at least 50,000-fold, at least 100,000-fold, at least 500,000-fold, or at least 1,000,000-fold increased as compared to the activity of Streptococcus pyogenes as provided by SEQ ID NO: 1 on the same target sequence. In some embodiments, the 3′ end of the target sequence is directly adjacent to an AAC, GAC, CAC, or TAC sequence.

[0412] In some embodiments, the Cas9 protein comprises a combination of mutations that exhibit activity on a target sequence comprising a 5′-NAT-3′ PAM sequence at its 3′-end. In some embodiments, the combinations of mutations are present in any one of the clones listed in Table 3. In some embodiments, the combinations of mutations are conservative mutations of the clones listed in Table 3. In some embodiments, the Cas9 protein comprises the combination of mutations of any one of the Cas9 clones listed in Table 3.

TABLE 3
NAT PAM Clones
MUTATIONS FROM WILD-TYPE SPCAS9 (E.G., SEQ ID NO: 1)

K961E, H985Y, D1135N, K1191N, E1219V, Q1221H, A1320A, P13218, R1335L
D1135N, G12188, E1219V, Q1221H, P1249S, P1321S, 01322G, R1335L
V7431, R7538, E790A, D1135N, G1218S, E1219V, Q1221H, A1227V, P1249S, N1286K, A1293T,
P13218, D1322G, R1335L, T1339I
F575S, M631L, R654L, V748I, V743I, R753G, D853E, V922A, R11148, D1135N, G1218S,
E1219V, Q1221H, A1227V, P1249S, N1286K, A1293T, P1321S, D1322G, R1335L, T13391
F575S, M631L, R654L, R664K, R753S, D853E, V922A, R1114G, D1135N, D1180G, G1218S,
E1219V, Q1221H, P1249S, N1286K, P1321S, D1322G, R1335L
M631L, R654L, R753G, K797E, D853E, V922A, D1012A, R1114G, D1135N, G12188, E1219V,
Q1221H, P1249S, N1317K, P1321S, D1322G, R1335L
F575S, M631L, R654L, R664K, R753G, D853E, V922A, R1114G, Y1131C, D1135N, D1180G,
G1218S, E1219V, Q1221H, P1249S, P1321S, D1322G, R1335L
F575S, M631L, R654L, R664K, R753G, D853E, V922A, R1114G, Y1131C, D1135N, D1180G,
G1218S, E1219V, Q1221H, P1249S, P1321S, D1322G, R1335L
F575S, D596Y, M631L, R654L, R664K, R753G, D853E, V922A, R1114G, Y1131C, D1135N,
D1180G, G1218S, E1219V, Q1221H, P1249S, Q1256R, P1321S, D1322G, R1335L
F575S, M631L, R654L, R664K, K710E, V750A, R753G, D853E, V922A, R1114G, Y1131C,
D1135N, D1180G, G1218S, E1219V, Q1221H, P1249S, P1321S, D1322G, R1335L
F575S, M631L, K649R, R654L, R664K, R753G, D853E, V922A, R1114G, Y1131C, D1135N,
K1156E, D1180G, G1218S, E1219V, Q1221H, P1249S, P1321S, D1322G, R1335L
F575S, M631L, R654L, R664K, R753G, D853E, V922A, R1114G, Y1131C, D1135N, D1180G,
G1218S, E1219V, Q1221H, P1249S, P1321S, D1322G, R1335L
F575S, M631L, R654L, R664K, R753G, D853E, V922A, I1057G, R1114G, Y1131C, D1135N,
D1180G, G1218S, E1219V, Q1221H, P1249S, N1308D, P1321S, D1322G, R1335L
M631L, R654L, R753G, D853E, V922A, R1114G, Y1131C, D1135N, E1150V, D1180G, G1218S,
E1219V, Q1221H, P1249S, P1321S, D1332G, R1335L
M631L, R654L, R664K, R753G, D853E, I1057V, Y1131C, D1135N, D1180G, G1218S, E1219V,
Q1221H, P1249S, P1321S, D1332G, R1335L
M631L, R654L, R664K, R753G, I1057V, R1114G, Y1131C, D1135N, D1180G, G1218S, E1219V,
Q1221H, P1249S, P1321S, D1332G, R1335L

[0413] The above description of various napDNAbps which can be used in connection with the presently disclose ABE and CBE base editors is not meant to be limiting in any way. The base editors may comprise the canonical SpCas9, or any ortholog Cas9 protein, or any variant Cas9 protein—including any naturally occurring variant, mutant, or otherwise engineered version of Cas9—that is known or which can be made or evolved through a directed evolutionary or otherwise mutagenic process. In various embodiments, the Cas9 or Cas9 variants have a nickase activity, i.e., only cleave of strand of the target DNA sequence. In other embodiments, the Cas9 or Cas9 variants have inactive nucleases, i.e., are “dead” Cas9 proteins. Other variant Cas9 proteins that may be used are those having a smaller molecular weight than the canonical SpCas9 (e.g., for easier delivery) or having modified or rearranged primary amino acid structure (e.g., the circular permutant formats). The base editors described herein may also comprise Cas9 equivalents, including Cas12a/Cpf1 and Cas12b proteins which are the result of convergent evolution. The napDNAbps used herein (e.g., SpCas9, Cas9 variant, or Cas9 equivalents) may also may also contain various modifications that alter/enhance their PAM specificities. Lastly, the application contemplates any Cas9, Cas9 variant, or Cas9 equivalent which has at least 70%, at least 75%, at least 80%, at least 85%, at least 90%, at least 91%, at least 92%, at least 93%, at least 94%, at least 95%, at least 96%, at least 97%, at least 98%, at least 99%, or at least 99.9% sequence identity to a reference Cas9 sequence, such as a references SpCas9 canonical sequences or a reference Cas9 equivalent (e.g., Cas12a/Cpf1).

[0414] In a particular embodiment, the Cas9 variant having expanded PAM capabilities is SpCas9 (H840A) VRQR, having the following amino acid sequence (with the V, R, Q, R substitutions relative to the SpCas9 (H840A) of SEQ ID NO: 343 show in bold underline. In addition, the methionine residue in SpCas9 (H840) was removed for SpCas9 (H840A) VRQR):

(SEQ ID NO: 374)
DKKYSIGLDIGTNSVGWAVITDEYKVPSKKFKVLGNTDRHSIKKNLIGAL
LFDSGETAEATRLKRTARRRYTRRKNRICYLQEIFSNEMAKVDDSFFHRL
EESFLVEEDKKHERHPIFGNIVDEVAYHEKYPTIYHLRKKLVDSTDKADL
RLIYLALAHMIKFRGHFLIEGDLNPDNSDVDKLFIQLVQTYNQLFEENPI
NASGVDAKAILSARLSKSRRLENLIAQLPGEKKNGLFGNLIALSLGLTPN
FKSNFDLAEDAKLQLSKDTYDDDLDNLLAQIGDQYADLFLAAKNLSDAIL
LSDILRVNTEITKAPLSASMIKRYDEHHQDLTLLKALVRQQLPEKYKEIF
FDQSKNGYAGYIDGGASQEEFYKFIKPILEKMDGTEELLVKLNREDLLRK
QRTFDNGSIPHQIHLGELHAILRRQEDFYPFLKDNREKIEKILTFRIPYY
VGPLARGNSRFAWMTRKSEETITPWNFEEVVDKGASAQSFIERMTNFDKN
LPNEKVLPKHSLLYEYFTVYNELTKVKYVTEGMRKPAFLSGEQKKAIVDL
LFKTNRKVTVKQLKEDYFKKIECFDSVEISGVEDRFNASLGTYHDLLKII
KDKDFLDNEENEDILEDIVLTLTLFEDREMIEERLKTYAHLFDDKVMKQL
KRRRYTGWGRLSRKLINGIRDKQSGKTILDFLKSDGFANRNFMQLIHDD
SLTFKEDIQKAQVSGQGDSLHEHIANLAGSPAIKKGILQTVKVVDELVKV
MGRHKPENIVIEMARENQTTQKGQKNSRERMKRIEEGIKELGSQILKEHP
VENTQLQNEKLYLYYLQNGRDMYVDQELDINRLSDYDVDAIVPQSFLKDD
SIDNKVLTRSDKNRGKSDNVPSEEVVKKMKNYWRQLLNAKLITQRKFDNL
TKAERGGLSELDKAGFIKRQLVETRQITKHVAQILDSRMNTKYDENDKLI
REVKVITLKSKLVSDFRKDFQFYKVREINNYHHAHDAYLNAVVGTALIKK
YPKLESEFVYGDYKVYDVRKMIAKSEQEIGKATAKYFFYSNIMNFFKTEI
TLANGEIRKRPLIETNGETGEIVWDKGRDFATVRKVLSMPQVNIVKKTEV
QTGGFSKESILPKRNSDKLIARKKDWDPKKYGGFVSPTVAYSVLVVAKVE
KGKSKKLKSVKELLGITIMERSSFEKNPIDFLEAKGYKEVKKDLIIKLPK
YSLFELENGRKRMLASARELQKGNELALPSKYVNFLYLASHYEKLKGSPE
DNEQKQLFVEQHKHYLDEIIEQISEFSKRVILADANLDKVLSAYNKHRDK
PIREQAENIIHLFTLTNLGAPAAFKYFDTTIDRKQYRSTKEVLDATLI
HQSITGLYETRIDLSQLGGD

[0415] In another particular embodiment, the Cas9 variant having expanded PAM capabilities is SpCas9 (H840A) VRER, having the following amino acid sequence (with the V, R, E, R substitutions relative to the SpCas9 (H840A) of SEQ ID NO: 343 are shown in bold underline. In addition, the methionine residue in SpCas9 (H840) was removed for SpCas9 (H840A) VRER):

(SEQ ID NO: 375)
DKKYSIGLDIGTNSVGWAVITDEYKVPSKKFKVLGNTDRHSIKKNLIGAL
LFDSGETAEATRLKRTARRRYTRRKNRICYLQEIFSNEMAKVDDSFFHRL
EESFLVEEDKKHERHPIFGNIVDEVAYHEKYPTIYHLRKKLVDSTDKADL
RLIYLALAHMIKFRGHFLIEGDLNPDNSDVDKLFIQLVQTYNQLFEENPI
NASGVDAKAILSARLSKSRRLENLIAQLPGEKKNGLFGNLIALSLGLTPN
FKSNFDLAEDAKLQLSKDTYDDDLDNLLAQIGDQYADLFLAAKNLSDAIL
LSDILRVNTEITKAPLSASMIKRYDEHHQDLTLLKALVRQQLPEKYKEIF
FDQSKNGYAGYIDGGASQEEFYKFIKPILEKMDGTEELLVKLNREDLLRK
QRTFDNGSIPHQIHLGELHAILRRQEDFYPFLKDNREKIEKILTFRIPYY
VGPLARGNSRFAWMTRKSEETITPWNFEEVVDKGASAQSFIERMTNFDKN
LPNEKVLPKHSLLYEYFTVYNELTKVKYVTEGMRKPAFLSGEQKKAIVDL
LFKTNRKVTVKQLKEDYFKKIECFDSVEISGVEDRFNASLGTYHDLLKII
KDKDFLDNEENEDILEDIVLTLTLFEDREMIEERLKTYAHLFDDKVMKQL
KRRRYTGWGRLSRKLINGIRDKQSGKTILDFLKSDGFANRNFMQLIHDDS
LTFKEDIQKAQVSGQGDSLHEHIANLAGSPAIKKGILQTVKVVDELVKVM
GRHKPENIVIEMARENQTTQKGQKNSRERMKRIEEGIKELGSQILKEHPV
ENTQLQNEKLYLYYLQNGRDMYVDQELDINRLSDYDVDAIVPQSFLKDDS
IDNKVLTRSDKNRGKSDNVPSEEVVKKMKNYWRQLLNAKLITQRKFDNLT
KAERGGLSELDKAGFIKRQLVETRQITKHVAQILDSRMNTKYDENDKLIR
EVKVITLKSKLVSDFRKDFQFYKVREINNYHHAHDAYLNAVVGTALIKKY
PKLESEFVYGDYKVYDVRKMIAKSEQEIGKATAKYFFYSNIMNFFKTEIT
LANGEIRKRPLIETNGETGEIVWDKGRDFATVRKVLSMPQVNIVKKTEVQ
TGGFSKESILPKRNSDKLIARKKDWDPKKYGGFVSPTVAYSVLVVAKVEK
GKSKKLKSVKELLGITIMERSSFEKNPIDFLEAKGYKEVKKDLIIKLPKY
SLFELENGRKRMLASARELQKGNELALPSKYVNFLYLASHYEKLKGSPED
NEQKQLFVEQHKHYLDEIIEQISEFSKRVILADANLDKVLSAYNKHRDKP
IREQAENIIHLFTLTNLGAPAAFKYFDTTIDRKEYRSTKEVLDATLIH
QSITGLYETRIDLSQLGGD

[0416] In addition, any available methods may be utilized to obtain or construct a variant or mutant Cas9 protein. The term “mutation,” as used herein, refers to a substitution of a residue within a sequence, e.g., a nucleic acid or amino acid sequence, with another residue, or a deletion or insertion of one or more residues within a sequence. Mutations are typically described herein by identifying the original residue followed by the position of the residue within the sequence and by the identity of the newly substituted residue. Various methods for making the amino acid substitutions (mutations) provided herein are well known in the art, and are provided by, for example, Green and Sambrook, Molecular Cloning: A Laboratory Manual (4th ed., Cold Spring Harbor Laboratory Press, Cold Spring Harbor, N.Y. (2012)). Mutations can include a variety of categories, such as single base polymorphisms, microduplication regions, indel, and inversions, and is not meant to be limiting in any way. Mutations can include “loss-of-function” mutations which are the normal result of a mutation that reduces or abolishes a protein activity. Most loss-of-function mutations are recessive, because in a heterozygote the second chromosome copy carries an unmutated version of the gene coding for a fully functional protein whose presence compensates for the effect of the mutation. Mutations also embrace “gain-of-function” mutations, which is one which confers an abnormal activity on a protein or cell that is otherwise not present in a normal condition. Many gain-of-function mutations are in regulatory sequences rather than in coding regions, and can therefore have a number of consequences. For example, a mutation might lead to one or more genes being expressed in the wrong tissues, these tissues gaining functions that they normally lack. Because of their nature, gain-of-function mutations are usually dominant.

[0417] Mutations can be introduced into a reference Cas9 protein using site-directed mutagenesis. Older methods of site-directed mutagenesis known in the art rely on sub-cloning of the sequence to be mutated into a vector, such as an M13 bacteriophage vector, that allows the isolation of single-stranded DNA template. In these methods, one anneals a mutagenic primer (i.e., a primer capable of annealing to the site to be mutated but bearing one or more mismatched nucleotides at the site to be mutated) to the single-stranded template and then polymerizes the complement of the template starting from the 3′ end of the mutagenic primer. The resulting duplexes are then transformed into host bacteria and plaques are screened for the desired mutation. More recently, site-directed mutagenesis has employed PCR methodologies, which have the advantage of not requiring a single-stranded template. In addition, methods have been developed that do not require sub-cloning. Several issues must be considered when PCR-based site-directed mutagenesis is performed. First, in these methods it is desirable to reduce the number of PCR cycles to prevent expansion of undesired mutations introduced by the polymerase. Second, a selection must be employed in order to reduce the number of non-mutated parental molecules persisting in the reaction. Third, an extended-length PCR method is preferred in order to allow the use of a single PCR primer set. And fourth, because of the non-template-dependent terminal extension activity of some thermostable polymerases it is often necessary to incorporate an end-polishing step into the procedure prior to blunt-end ligation of the PCR-generated mutant product.

[0418] Mutations may also be introduced by directed evolution processes, such as phage-assisted continuous evolution (PACE) or phage-assisted noncontinuous evolution (PANCE). The term “phage-assisted continuous evolution (PACE),” as used herein, refers to continuous evolution that employs phage as viral vectors. The general concept of PACE technology has been described, for example, in International PCT Application, PCT/US2009/056194, filed Sep. 8, 2009, published as WO 2010/028347 on Mar. 11, 2010; International PCT Application, PCT/US2011/066747, filed Dec. 22, 2011, published as WO 2012/088381 on Jun. 28, 2012; U.S. application, U.S. Pat. No. 9,023,594, issued May 5, 2015, International PCT Application, PCT/US2015/012022, filed Jan. 20, 2015, published as WO 2015/134121 on Sep. 11, 2015, and International PCT Application, PCT/US2016/027795, filed Apr. 15, 2016, published as WO 2016/168631 on Oct. 20, 2016, the entire contents of each of which are incorporated herein by reference. Variant Cas9s may also be obtain by phage-assisted non-continuous evolution (PANCE),” which as used herein, refers to non-continuous evolution that employs phage as viral vectors. PANCE is a simplified technique for rapid in vivo directed evolution using serial flask transfers of evolving ‘selection phage’ (SP), which contain a gene of interest to be evolved, across fresh E. coli host cells, thereby allowing genes inside the host E. coli to be held constant while genes contained in the SP continuously evolve. Serial flask transfers have long served as a widely-accessible approach for laboratory evolution of microbes, and, more recently, analogous approaches have been developed for bacteriophage evolution. The PANCE system features lower stringency than the PACE system.

### Adenosine Deaminases

[0419] The fusion protein base editors described herein may include an adenosine deaminase domain.

[0420] The disclosure provides fusion proteins that comprise one or more adenosine deaminases. In some aspects, such fusion proteins are capable of deaminating adenosine in a nucleic acid sequence (e.g., DNA or RNA). As one example, any of the fusion proteins provided herein may be base editors, (e.g., adenine base editors). Without wishing to be bound by any particular theory, dimerization of adenosine deaminases (e.g., in cis or in trans) may improve the ability (e.g., efficiency) of the fusion protein to modify a nucleic acid base, for example to deaminate adenine. In some embodiments, any of the fusion proteins may comprise 2, 3, 4 or 5 adenosine deaminases. In some embodiments, any of the fusion proteins provided herein comprise two adenosine deaminases. Exemplary, non-limiting, embodiments of adenosine deaminases are provided herein. It should be appreciated that the mutations provided herein (e.g., mutations in ecTadA) may be applied to adenosine deaminases in other adenosine base editors, for example those provided in U.S. Patent Publication No. 2018/0073012, published Mar. 15, 2018, which issued as U.S. Pat. No. 10,113,163, on Oct. 30, 2018; U.S. Patent Publication No. 2017/0121693, published May 4, 2017, which issued as U.S. Pat. No. 10,167,457 on Jan. 1, 2019; International Publication No. WO 2017/070633, published Apr. 27, 2017; U.S. Patent Publication No. 2015/0166980, published Jun. 18, 2015; U.S. Pat. No. 9,840,699, issued Dec. 12, 2017; and U.S. Pat. No. 10,077,453, issued Sep. 18, 2018, all of which are incorporated herein by reference in their entireties.

[0421] In some embodiments, any of the adenosine deaminases provided herein are capable of deaminating adenine. In some embodiments, the adenosine deaminases provided herein are capable of deaminating adenine in a deoxyadenosine residue of DNA. The adenosine deaminase may be derived from any suitable organism (e.g., E. coli). In some embodiments, the adenosine deaminase is a naturally-occurring adenosine deaminase that includes one or more mutations corresponding to any of the mutations provided herein (e.g., mutations in ecTadA). One of skill in the art will be able to identify the corresponding residue in any homologous protein and in the respective encoding nucleic acid by methods well known in the art, e.g., by sequence alignment and determination of homologous residues. Accordingly, one of skill in the art would be able to generate mutations in any naturally-occurring adenosine deaminase (e.g., having homology to ecTadA) that corresponds to any of the mutations described herein, e.g., any of the mutations identified in ecTadA. In some embodiments, the adenosine deaminase is from a prokaryote. In some embodiments, the adenosine deaminase is from a bacterium. In some embodiments, the adenosine deaminase is from Escherichia coli, Staphylococcus aureus, Salmonella typhi, Shewanella putrefaciens, Haemophilus influenzae, Caulobacter crescentus, or Bacillus subtilis. In some embodiments, the adenosine deaminase is from E. coli.

[0422] In some embodiments, the adenosine deaminase comprises an amino acid sequence that is at least 60%, at least 65%, at least 70%, at least 75%, at least 80%, at least 85%, at least 90%, at least 95%, at least 96%, at least 97%, at least 98%, at least 99%, or at least 99.5% identical to any one of the amino acid sequences set forth in any one of SEQ ID NOs: 86-107, or to any of the adenosine deaminases provided herein. It should be appreciated that adenosine deaminases provided herein may include one or more mutations (e.g., any of the mutations provided herein). The disclosure provides adenosine deaminases with a certain percent identity plus any of the mutations or combinations thereof described herein. In some embodiments, the adenosine deaminase comprises an amino acid sequence that has 1, 2, 3, 4, 5, 6, 7, 8, 9, 10, 11, 12, 13, 14, 15, 16, 17, 18, 19, 20, 21, 22, 21, 24, 25, 26, 27, 28, 29, 30, 31, 32, 33, 34, 35, 36, 37, 38, 39, 40, 41, 42, 43, 44, 45, 46, 47, 48, 49, 50, or more mutations compared to any one of the amino acid sequences set forth in SEQ ID NOs: 86-107, or any of the adenosine deaminases provided herein. In some embodiments, the adenosine deaminase comprises an amino acid sequence that has at least 5, at least 10, at least 15, at least 20, at least 25, at least 30, at least 35, at least 40, at least 45, at least 50, at least 60, at least 70, at least 80, at least 90, at least 100, at least 110, at least 120, at least 130, at least 140, at least 150, at least 160, or at least 170 identical contiguous amino acid residues as compared to any one of the amino acid sequences set forth in SEQ ID NOs: 86-107, or any of the adenosine deaminases provided herein.

[0423] In some embodiments, the adenosine deaminase comprises a E59X mutation in ecTadA SEQ ID NO: 86, or a corresponding mutation in another adenosine deaminase, where X indicates any amino acid other than the corresponding amino acid in the wild-type adenosine deaminase. In particular embodiments, the adenosine deaminase comprises a E59A mutation in SEQ ID NO: 86, or a corresponding mutation in another adenosine deaminase.

[0424] In some embodiments, the adenosine deaminase comprises a D108X mutation in ecTadA SEQ ID NO: 86, or a corresponding mutation in another adenosine deaminase, where X indicates any amino acid other than the corresponding amino acid in the wild-type adenosine deaminase. In some embodiments, the adenosine deaminase comprises a D108W, D108Q, D108F, D108K, or D108M mutation in SEQ ID NO: 86, or a corresponding mutation in another adenosine deaminase. In particular embodiments, the adenosine deaminase comprises a D108W mutation in SEQ ID NO: 86, or a corresponding mutation in another adenosine deaminase. It should be appreciated, however, that additional deaminases may similarly be aligned to identify homologous amino acid residues that may be mutated as provided herein.

[0425] In some embodiments, the adenosine deaminase comprises TadA 7.10, whose sequence is provided as SEQ ID NO: 96, or a variant thereof. TadA7.10 comprises the following mutations in ecTadA: W23R, H36L, P48A, R51L, L84F, A106V, D108N, H123Y, S146C, D147Y, R152P, E155V, I156F, K157N.

[0426] In particular embodiments, the adenosine deaminase comprises an N108W mutation in SEQ ID NO: 96, an embodiment also referred to as TadA 7.10(N108W). Its sequence is provided as SEQ ID NO: 98.

[0427] In some embodiments, the adenosine deaminase comprises an A106X mutation in ecTadA SEQ ID NO: 86, or a corresponding mutation in another adenosine deaminase, where X indicates any amino acid other than the corresponding amino acid in the wild-type adenosine deaminase. In some embodiments, the adenosine deaminase comprises an A106V mutation in SEQ ID NO: 86, or a corresponding mutation in another adenosine deaminase. In some embodiments, the adenosine deaminase comprises an A106Q, A106F, A106W, or A106M mutation in SEQ ID NO: 86, or a corresponding mutation in another adenosine deaminase.

[0428] In particular embodiments, the adenosine deaminase comprises a V106W mutation in SEQ ID NO: 96, an embodiment also referred to as TadA 7.10(V106W). Its sequence is provided as SEQ ID NO: 97.

[0429] In some embodiments, the adenosine deaminase comprises a R47X mutation in SEQ ID NO: 86, or a corresponding mutation in another adenosine deaminase, where the presence of X indicates any amino acid other than the corresponding amino acid in the wild-type adenosine deaminase. In some embodiments, the adenosine deaminase comprises a R47Q, R47F, R47W, or R47M mutation in SEQ ID NO: 86, or a corresponding mutation in another adenosine deaminase.

[0430] In particular embodiments, the adenosine deaminase comprises a R47Q, R47F, R47W, or R47M mutation in SEQ ID NO: 96.

[0431] In particular embodiments, the adenosine deaminase comprises a V106Q mutation and an N108W mutation in SEQ ID NO: 96. In particular embodiments, the adenosine deaminase comprises a V106W mutation, an N108W mutation and an R47Z mutation, wherein Z is selected from the residues consisting of Q, F, W and M, in SEQ ID NO: 86.

[0432] It should be appreciated that any of the mutations provided herein (e.g., based on the ecTadA amino acid sequence of SEQ ID NO: 86) may be introduced into other adenosine deaminases, such as S. aureus TadA (saTadA), or other adenosine deaminases (e.g., bacterial adenosine deaminases), such as those sequences provided below. It would be apparent to the skilled artisan how to identify amino acid residues from other adenosine deaminases that are homologous to the mutated residues in ecTadA. Thus, any of the mutations identified in ecTadA may be made in other adenosine deaminases that have homologous amino acid residues. It should also be appreciated that any of the mutations provided herein may be made individually or in any combination in ecTadA or another adenosine deaminase. For example, an adenosine deaminase may contain a D108N, a A106V, and/or a R47Q mutation in ecTadA SEQ ID NO: 86, or a corresponding mutation in another adenosine deaminase.

[0433] In some embodiments, the adenosine deaminase comprises one, two, or three mutations selected from the group consisting of D108, A106, and R47 in SEQ ID NO: 86, or a corresponding mutation or mutations in another adenosine deaminase.

[0434] In other aspects, the disclosure provides adenine base editors with broadened target sequence compatibility. In general, native ecTadA deaminates the adenine in the sequence UAC (e.g., the target sequence) of the anticodon loop of tRNA^{Arg}. Without wishing to be bound by any particular theory, in order to expand the utility of ABEs comprising one or more ecTadA deaminases, such as any of the adenosine deaminases provided herein, the adenosine deaminase proteins were optimized to recognize a wide variety of target sequences within the protospacer sequence without compromising the editing efficiency of the adenosine nucleobase editor complex. In some embodiments, the target sequence is an A in the middle of a 5′-NAN-3′ sequence, wherein N is T, C, G, or A. In some embodiments, the target sequence comprises 5′-TAC-3′. In some embodiments, the target sequence comprises 5′-GAA-3′.

[0435] In some embodiments, the adenosine deaminase is an N-terminal truncated E. coli TadA. In certain embodiments, the adenosine deaminase comprises the amino acid sequence:

(SEQ ID NO: 44)
MSEVEFSHEYWMRHALTLAKRAWDEREVPVGAVLVHNNRVIGEGWNRPIG
RHDPTAHAEIMALRQGGLVMQNYRLIDATLYVTLEPCVMCAGAMIHSRIG
RVVFGARDAKTGAAGSLMDVLHHPGMNHRVEITEGILADECAALLSDFFR
MRRQEIKAQKKAQSSTD.

[0436] In some embodiments, the TadA deaminase is a full-length E. coli TadA deaminase (ecTadA). For example, in certain embodiments, the adenosine deaminase comprises the amino acid sequence:

(SEQ ID NO: 45)
MRRAFITGVFFLSEVEFSHEYWMRHALTLAKRAWDEREVPVGAVLVHNNR
VIGEGWNRPIGRHDPTAHAEIMALRQGGLVMQNYRLIDATLYVTLEPCVM
CAGAMIHSRIGRVVFGARDAKTGAAGSLMDVLHHPGMNHRVEITEGILAD
ECAALLSDFFRMRRQEIKAQKKAQSSTD

[0437] It should be appreciated, however, that additional adenosine deaminases useful in the present application would be apparent to the skilled artisan and are within the scope of this disclosure. For example, the adenosine deaminase may be a homolog of an ADAT. Exemplary ADAT homologs include, without limitation:

Staphylococcus aureus TadA:
(SEQ ID NO: 46)
MGSHMTNDIYFMTLAIEEAKKAAQLGEVPIGAIITKDDEVIARAHNLRET
LQQPTAHAEHIAIERAAKVLGSWRLEGCTLYVTLEPCVMCAGTIVMSRIP
RVVYGADDPKGGCSGSLMNLLQQSNFNHRAIVDKGVLKEACSTLLTTFFK
NLRANKKSTN
Bacillus subtilis TadA:
(SEQ ID NO: 47)
MTQDELYMKEAIKEAKKAEEKGEVPIGAVLVINGEIIARAHNLRETEQRS
IAHAEMLVIDEACKALGTWRLEGATLYVTLEPCPMCAGAVVLSRVEKVVF
GAFDPKGGCSGTLMNLLQEERFNHQAEVVSGVLEEECGGMLSAFFRELRK
KKKAARKNLSE
Salmonella typhimurium (S. typhimurium) TadA:
(SEQ ID NO: 48)
MPPAFITGVTSLSDVELDHEYWMRHALTLAKRAWDEREVPVGAVLVHNHR
VIGEGWNRPIGRHDPTAHAEIMALRQGGLVLQNYRLLDTTLYVTLEPCVM
CAGAMVHSRIGRVVFGARDAKTGAAGSLIDVLHHPGMNHRVEIIEGVLRD
ECATLLSDFFRMRRQEIKALKKADRAEGAGPAV
Shewanella putrefaciens (S. putrefaciens) TadA:
(SEQ ID NO: 49)
MDEYWMQVAMQMAEKAEAAGEVPVGAVLVKDGQQIATGYNLSISQHDPTA
HAEILCLRSAGKKLENYRLLDATLYITLEPCAMCAGAMVHSRIARVVYGA
RDEKTGAAGTVVNLLQHPAFNHQVEVTSGVLAEACSAQLSRFFKRRRDEK
KALKLAQRAQQGIE
Haemophilus influenzae F3031 (H. influenzae) TadA:
(SEQ ID NO: 50)
MDAAKVRSEFDEKMMRYALELADKAEALGEIPVGAVLVDDARNIIGEGWN
LSIVQSDPTAHAEIIALRNGAKNIQNYRLLNSTLYVTLEPCTMCAGAILH
SRIKRLVFGASDYKTGAIGSRFHFFDDYKMNHTLEITSGVLAEECSQKLS
TFFQKRREEKKIEKALLKSLSDK
Caulobacter crescentus (C. crescentus) TadA:
(SEQ ID NO: 51)
MRTDESEDQDHRMMRLALDAARAAAEAGETPVGAVILDPSTGEVIATAGN
GPIAAHDPTAHAEIAAMRAAAAKLGNYRLTDLTLVVTLEPCAMCAGAISH
ARIGRVVFGADDPKGGAVVHGPKFFAQPTCHWRPEVTGGVLADESADLLR
GFFRARRKAKI
Geobacter sulfurreducens (G. sulfurreducens) TadA:
(SEQ ID NO: 52)
MSSLKKTP1RDDAYWMGKAIREAAKAAARDEVPIGAVIVRDGAVIGRGHN
LREGSNDPSAHAEMIAIRQAARRSANWRLTGATLYVTLEPCLMCMGAIIL
ARLERVVFGCYDPKGGAAGSLYDLSADPRLNHQVRLSPGVCQEECGTMLS
DFFRDLRRRKKAKATPALFIDERKVPPEP

[0438] Exemplary adenosine deaminase variants of the disclosure are described below. In certain embodiments, the adenosine deaminase has a sequence with at least 80%, at least 85%, at least 90%, at least 95%, at least 98%, at least 99%, or at least 99.5% sequence identity to one of the following:

(Ec)TadA, catalytically inactive (E59A)
(SEQ ID NO: 53)
MSEVEFSHEYWMRHALTLAKRAWDEREVPVGAVLVHNNRVIGEGWNRPIG
RHDPTAHAAIMALRQGGLVMQNYRLIDATLYVTLEPCVMCAGAMIHSRIG
RVVFGARDAKTGAAGSLMDVLHHPGMNHRVEITEGILADECAALLSDFFR
MRRQEIKAQKKAQSSTD
TadA 7.10
(SEQ ID NO: 54)
MSEVEFSHEYWMRHALTLAKRARDEREVPVGAVLVLNNRVIGEGWNRAIG
LHDPTAHAEIMALRQGGLVMQNYRLIDATLYVTFEPCVMCAGAMIHSRIG
RVVFGVRNAKTGAAGSLMDVLHYPGMNHRVEITEGILADECAALLCYFFR
MPRQVFNAQKKAQSSTD
TadA 7.10 (V106W)
(SEQ ID NO: 55)
MSEVEFSHEYWMRHALTLAKRARDEREVPVGAVLVLNNRVIGEGWNRAIG
LHDPTAHAEIMALRQGGLVMQNYRLIDATLYVTFEPCVMCAGAMIHSRIG
RVVFGWRNAKTGAAGSLMDVLHYPGMNHRVEITEGILADECAALLCYFFR
MPRQVFNAQKKAQSSTD
TadA 7.10 (N108W)
(SEQ ID NO: 56)
MSEVEFSHEYWMRHALTLAKRARDEREVPVGAVLVLNNRVIGEGWNRAIG
LHDPTAHAEIMALRQGGLVMQNYRLIDATLYVTFEPCVMCAGAMIHSRIG
RVVFGVRWAKTGAAGSLMDVLHYPGMNHRVEITEGILADECAALLCYFFR
MPRQVFNAQKKAQSSTD
TadA 7.10 (N108Q)
(SEQ ID NO: 57)
MSEVEFSHEYWMRHALTLAKRARDEREVPVGAVLVLNNRVIGEGWNRAIG
LHDPTAHAEIMALRQGGLVMQNYRLIDATLYVTFEPCVMCAGAMIHSRIG
RVVFGVRQAKTGAAGSLMDVLHYPGMNHRVEITEGILADECAALLCYFFR
MPRQVFNAQKKAQSSTD
TadA 7.10 (V106F)
(SEQ ID NO: 58)
MSEVEFSHEYWMRHALTLAKRARDEREVPVGAVLVLNNRVIGEGWNRAIG
LHDPTAHAEIMALRQGGLVMQNYRLIDATLYVTFEPCVMCAGAMIHSRIG
RVVFGFRNAKTGAAGSLMDVLHYPGMNHRVEITEGILADECAALLCYFFR
MPRQVFNAQKKAQSSTD
TadA 7.10 (V106Q)
(SEQ ID NO: 59)
MSEVEFSHEYWMRHALTLAKRARDEREVPVGAVLVLNNRVIGEGWNRAIG
LHDPTAHAEIMALRQGGLVMQNYRLIDATLYVTFEPCVMCAGAMIHSRIG
RVVFGQRNAKTGAAGSLMDVLHYPGMNHRVEITEGILADECAALLCYFFR
MPRQVFNAQKKAQSSTD
TadA 7.10 (V106M)
(SEQ ID NO: 60)
MSEVEFSHEYWMRHALTLAKRARDEREVPVGAVLVLNNRVIGEGWNRAIG
LHDPTAHAEIMALRQGGLVMQNYRLIDATLYVTFEPCVMCAGAMIHSRIG
RVVFGMRNAKTGAAGSLMDVLHYPGMNHRVEITEGILADECAALLCYFFR
MPRQVFNAQKKAQSSTD
TadA 7.10 (R47F)
(SEQ ID NO: 61)
MSEVEFSHEYWMRHALTLAKRARDEREVPVGAVLVLNNRVIGEGWNFAIG
LHDPTAHAEIMALRQGGLVMQNYRLIDATLYVTFEPCVMCAGAMIHSRIG
RVVFGVRNAKTGAAGSLMDVLHYPGMNHRVEITEGILADECAALLCYFFR
MPRQVFNAQKKAQSSTD
TadA 7.10 (R47W)
(SEQ ID NO: 62)
MSEVEFSHEYWMRHALTLAKRARDEREVPVGAVLVLNNRVIGEGWNWAIG
LHDPTAHAEIMALRQGGLVMQNYRLIDATLYVTFEPCVMCAGAMIHSRIG
RVVFGVRNAKTGAAGSLMDVLHYPGMNHRVEITEGILADECAALLCYFFR
MPRQVFNAQKKAQSSTD
TadA 7.10 (R47Q)
(SEQ ID NO: 63)
MSEVEFSHEYWMRHALTLAKRARDEREVPVGAVLVLNNRVIGEGWNQAIG
LHDPTAHAEIMALRQGGLVMQNYRLIDATLYVTFEPCVMCAGAMIHSRIG
RVVFGVRNAKTGAAGSLMDVLHYPGMNHRVEITEGILADECAALLCYFFR
MPRQVFNAQKKAQSSTD
TadA 7.10 (R47M)
(SEQ ID NO: 64)
MSEVEFSHEYWMRHALTLAKRARDEREVPVGAVLVLNNRVIGEGWNMAIG
LHDPTAHAEIMALRQGGLVMQNYRLIDATLYVTFEPCVMCAGAMIHSRIG
RVVFGVRNAKTGAAGSLMDVLHYPGMNHRVEITEGILADECAALLCYFFR
MPRQVFNAQKKAQSSTD
TadA (E59Q)
(SEQ ID NO: 65)
MSEVEFSHEYWMRHALTLAKRAWDEREVPVGAVLVHNNRVIGEGWNRPIG
RHDPTAHAQIMALRQGGLVMQNYRLIDATLYVTLEPCVMCAGAMIHSRIG
RVVFGARDAKTGAAGSLMDVLHHPGMNHRVEITEGILADECAALLSDFFR
MRRQEIKAQKKAQSSTD

[0439] Any two or more of the adenosine deaminases described herein may be connected to one another (e.g. by a linker) within an adenosine deaminase domain of the fusion proteins provided herein. For instance, the fusion proteins provided herein may contain only two adenosine deaminases. In some embodiments, the adenosine deaminases are the same. In some embodiments, the adenosine deaminases are any of the adenosine deaminases provided herein. In some embodiments, the adenosine deaminases are different. In some embodiments, the first adenosine deaminase is any of the adenosine deaminases provided herein, and the second adenosine is any of the adenosine deaminases provided herein, but is not identical to the first adenosine deaminase. In some embodiments, the fusion protein comprises two adenosine deaminases (e.g., a first adenosine deaminase and a second adenosine deaminase). In some embodiments, the fusion protein comprises a first adenosine deaminase and a second adenosine deaminase. In some embodiments, the first adenosine deaminase is N-terminal to the second adenosine deaminase in the fusion protein. In some embodiments, the first adenosine deaminase is C-terminal to the second adenosine deaminase in the fusion protein. In some embodiments, the first adenosine deaminase and the second deaminase are fused directly or via a linker.

[0440] In particular embodiments, the base editors disclosed herein comprise a heterodimer of a first adenosine deaminase that is N-terminal to a second adenosine deaminase, wherein the first adenosine deaminase comprises a sequence with at least 80%, 85%, 90%, 95%, 98%, 99%, or 99.5% sequence identity to SEQ ID NO: 95; and the second adenosine deaminase comprises a sequence with at least 80%, 85%, 90%, 95%, 98%, 99%, or 99.5% sequence identity to SEQ ID NO: 97.

[0441] In other embodiments, the second adenosine deaminase of the base editors provided herein comprises a sequence with at least 80%, 85%, 90%, 95%, 98%, 99%, or 99.5% sequence identity to SEQ ID NO: 96 (TadA 7.10), wherein any sequence variation may only occur in amino acid positions other than R47, V106 or N108 of SEQ ID NO: 96. In other words, these embodiments must contain amino acid substitutions at R47, V106 or N108 of SEQ ID NO: 96.

[0442] In other embodiments, the second adenosine deaminase of the heterodimer comprises a sequence with at least 80%, 85%, 90%, 95%, 98%, 99%, or 99.5% sequence identity to SEQ ID NO: 107. In other embodiments, second adenosine deaminase comprises a sequence with at least 80%, 85%, 90%, 95%, 98%, 99%, or 99.5% sequence identity to SEQ ID NOs: 98 or 99. In other embodiments, second adenosine deaminase comprises a sequence with at least 80%, 85%, 90%, 95%, 98%, 99%, or 99.5% sequence identity to a sequence selected from SEQ ID NOs: 100-102. In other embodiments, second adenosine deaminase comprises a sequence with at least 80%, 85%, 90%, 95%, 98%, 99%, or 99.5% sequence identity to a sequence selected from SEQ ID NOs: 103-106.

[0443] Two or more of the adenosine deaminases disclosed above (e.g. the adenosine deaminase mutants disclosed) comprise an adenosine deaminase domain. The adenosine deaminase domain is one of two domains in a fusion protein as disclosed below. The other domains is a nuclease programmable DNA binding protein (“napDNAbp”) domain, e.g. a Cas9 domain.

[0444] Exemplary aspects of the disclosure provide fusion proteins comprising a Cas9 domain and an adenosine deaminase domain. The Cas9 domain may be any of the Cas9 domains or Cas9 proteins (e.g., dCas9 or nCas9) provided herein. In some embodiments, any of the Cas9 domains or Cas9 proteins (e.g., dCas9 or nCas9) provided herein may be fused with any of the adenosine deaminases provided herein.

[0445] In some embodiments, the fusion proteins comprising adenosine deaminases and a napDNAbp (e.g., Cas9 domain) do not include a linker sequence. In some embodiments, a linker is present between the adenosine deaminases and/or between an adenosine deaminase and the napDNAbp. In some embodiments, the “]-[” used in the general architecture above indicates the presence of an optional linker. In some embodiments, an adenosine deaminase and the napDNAbp are fused via any of the linkers provided herein, and the adenosine deaminases are fused to each other via any of the linkers provided herein. For example, in some embodiments the adenosine deaminases and the napDNAbp are fused via any of the linkers provided below in the section entitled “Linkers”.

[0446] In some embodiments, the general architecture of exemplary fusion proteins comprising a first adenosine deaminase, a second adenosine deaminase, and a napDNAbp.

[0447] NH₂-[first adenosine deaminase]-[second adenosine deaminase]-[napDNAbp]-COOH;

[0448] NH₂-[first adenosine deaminase]-[napDNAbp]-[second adenosine deaminase]-COOH;

[0449] NH₂-[napDNAbp]-[first adenosine deaminase]-[second adenosine deaminase]-COOH;

[0450] NH₂-[second adenosine deaminase]-[first adenosine deaminase]-[napDNAbp]-COOH;

[0451] NH₂-[second adenosine deaminase]-[napDNAbp]-[first adenosine deaminase]-COOH;

[0452] NH₂-[napDNAbp]-[second adenosine deaminase]-[first adenosine deaminase]-COOH;

[0453] In particular embodiments, the disclosure provides a fusion protein comprising the architecture NH₂-[first adenosine deaminase]-[second adenosine deaminase]-[napDNAbp]-[NLS]-COOH.

[0454] Exemplary fusion proteins comprising a first adenosine deaminase, a second adenosine deaminase, a napDNAbp, and an NLS, where NLS is a nuclear localization sequence (e.g., any NLS provided herein).

[0455] In some embodiments, the general architecture of exemplary fusion proteins with a first adenosine deaminase, a second adenosine deaminase, and a napDNAbp comprises any one of the following structures, where NLS is a nuclear localization sequence (e.g., any NLS provided herein), NH₂ is the N-terminus of the fusion protein, and COOH is the C-terminus of the fusion protein.

[0456] NH₂-[NLS]-[first adenosine deaminase]-[second adenosine deaminase]-[napDNAbp]-COOH;

[0457] NH₂-[first adenosine deaminase]-[NLS]-[second adenosine deaminase]-[napDNAbp]-COOH;

[0458] NH₂-[first adenosine deaminase]-[second adenosine deaminase]-[NLS]-[napDNAbp]-COOH;

[0459] NH₂-[first adenosine deaminase]-[second adenosine deaminase]-[napDNAbp]-[NLS]-COOH;

[0460] NH₂-[NLS]-[first adenosine deaminase]-[napDNAbp]-[second adenosine deaminase]-COOH;

[0461] NH₂-[first adenosine deaminase]-[NLS]-[napDNAbp]-[second adenosine deaminase]-COOH;

[0462] NH₂-[first adenosine deaminase]-[napDNAbp]-[NLS]-[second adenosine deaminase]-COOH;

[0463] NH₂-[first adenosine deaminase]-[napDNAbp]-[second adenosine deaminase]-[NLS]-COOH;

[0464] NH₂-[NLS]-[napDNAbp]-[first adenosine deaminase]-[second adenosine deaminase]-COOH;

[0465] NH₂-[napDNAbp]-[NLS]-[first adenosine deaminase]-[second adenosine deaminase]-COOH;

[0466] NH₂-[napDNAbp]-[first adenosine deaminase]-[NLS]-[second adenosine deaminase]-COOH;

[0467] NH₂-[napDNAbp]-[first adenosine deaminase]-[second adenosine deaminase]-[NLS]-COOH;

[0468] NH₂-[NLS]-[second adenosine deaminase]-[first adenosine deaminase]-[napDNAbp]-COOH;

[0469] NH₂-[second adenosine deaminase]-[NLS]-[first adenosine deaminase]-[napDNAbp]-COOH;

[0470] NH₂-[second adenosine deaminase]-[first adenosine deaminase]-[NLS]-[napDNAbp]-COOH;

[0471] NH₂-[second adenosine deaminase]-[first adenosine deaminase]-[napDNAbp]-[NLS]-COOH;

[0472] NH₂-[NLS]-[second adenosine deaminase]-[napDNAbp]-[first adenosine deaminase]-COOH;

[0473] NH₂-[second adenosine deaminase]-[NLS]-[napDNAbp]-[first adenosine deaminase]-COOH;

[0474] NH₂-[second adenosine deaminase]-[napDNAbp]-[NLS]-[first adenosine deaminase]-COOH;

[0475] NH₂-[second adenosine deaminase]-[napDNAbp]-[first adenosine deaminase]-[NLS]-COOH;

[0476] NH₂-[NLS]-[napDNAbp]-[second adenosine deaminase]-[first adenosine deaminase]-COOH;

[0477] NH₂-[napDNAbp]-[NLS]-[second adenosine deaminase]-[first adenosine deaminase]-COOH;

[0478] NH₂-[napDNAbp]-[second adenosine deaminase]-[NLS]-[first adenosine deaminase]-COOH; or

[0479] NH₂-[napDNAbp]-[second adenosine deaminase]-[first adenosine deaminase]-[NLS]-COOH.

### Cytidine Deaminases

[0480] The fusion protein base editors described herein may include a cytidine deaminase domain.

[0481] In some embodiments, the deaminase domain is a cytidine deaminase domain. A cytidine deaminase domain may also be referred to interchangeably as a cytosine deaminase domain. In some embodiments, the cytidine deaminase catalyzes the hydrolytic deamination of cytidine (C) or deoxycytidine (dC) to uridine (U) or deoxyuridine (dU), respectively. In some embodiments, the cytidine deaminase domain catalyzes the hydrolytic deamination of cytosine (C) to uracil (U). In some embodiments, the cytidine deaminase catalyzes the hydrolytic deamination of cytidine or cytosine in deoxyribonucleic acid (DNA). Without wishing to be bound by any particular theory, fusion proteins comprising a cytidine deaminase are useful inter alia for targeted editing, referred to herein as “base editing,” of nucleic acid sequences in vitro and in vivo.

[0482] One exemplary suitable type of cytidine deaminase is a cytidine deaminase, for example, of the APOBEC family. The apolipoprotein B mRNA-editing complex (APOBEC) family of cytidine deaminase enzymes encompasses eleven proteins that serve to initiate mutagenesis in a controlled and beneficial manner (see, e.g., Conticello S G. The AID/APOBEC family of nucleic acid mutators. Genome Biol. 2008; 9(6):229). One family member, activation-induced cytidine deaminase (AID), is responsible for the maturation of antibodies by converting cytosines in ssDNA to uracils in a transcription-dependent, strand-biased fashion (see, e.g., Reynaud C A, et al. What role for AID: mutator, or assembler of the immunoglobulin mutasome, Nat Immunol. 2003; 4(7):631-638). The apolipoprotein B editing complex 3 (APOBEC3) enzyme provides protection to human cells against a certain HIV-1 strain via the deamination of cytosines in reverse-transcribed viral ssDNA (see, e.g., Bhagwat A S. DNA-cytosine deaminases: from antibody maturation to antiviral defense. DNA Repair (Amst). 2004; 3(1):85-89). These proteins all require a Zn²⁺-coordinating motif (His-X-Glu-X₂₃₋₂₆-Pro-Cys-X₂₋₄-Cys) and bound water molecule for catalytic activity. The Glu residue acts to activate the water molecule to a zinc hydroxide for nucleophilic attack in the deamination reaction. Each family member preferentially deaminates at its own particular “hotspot”, ranging from WRC (W is A or T, R is A or G) for hAID, to TTC for hAPOBEC3F (see, e.g., Navaratnam N and Sarwar R. An overview of cytidine deaminases. Int J Hematol. 2006; 83(3):195-200). A recent crystal structure of the catalytic domain of APOBEC3G revealed a secondary structure comprised of a five-stranded β-sheet core flanked by six α-helices, which is believed to be conserved across the entire family (see, e.g., Holden L G, et al. Crystal structure of the anti-viral APOBEC3G catalytic domain and functional implications. Nature. 2008; 456(7218):121-4). The active center loops have been shown to be responsible for both ssDNA binding and in determining “hotspot” identity (see, e.g., Chelico L, et al. Biochemical basis of immunological and retroviral responses to DNA-targeted cytosine deamination by activation-induced cytidine deaminase and APOBEC3G. J Biol Chem. 2009; 284(41). 27761-5). Overexpression of these enzymes has been linked to genomic instability and cancer, thus highlighting the importance of sequence-specific targeting (see, e.g., Pham P, et al. Reward versus risk: DNA cytidine deaminases triggering immunity and disease. Biochemistry. 2005; 44(8):2703-15).

[0483] Some aspects of this disclosure relate to the recognition that the activity of cytidine deaminase enzymes such as APOBEC enzymes can be directed to a specific site in genomic DNA. Without wishing to be bound by any particular theory, advantages of using a nucleic acid programmable binding protein (e.g., a Cas9 domain) as a recognition agent include (1) the sequence specificity of nucleic acid programmable binding protein (e.g., a Cas9 domain) can be easily altered by simply changing the sgRNA sequence; and (2) the nucleic acid programmable binding protein (e.g., a Cas9 domain) may bind to its target sequence by denaturing the dsDNA, resulting in a stretch of DNA that is single-stranded and therefore a viable substrate for the deaminase. It should be understood that other catalytic domains of napDNAbps, or catalytic domains from other nucleic acid editing proteins, can also be used to generate fusion proteins with Cas9, and that the disclosure is not limited in this regard.

[0484] In view of the results provided herein regarding the nucleotides that can be targeted by Cas9:deaminase fusion proteins, a person of ordinary skill in the art will be able to design suitable guide RNAs to target the fusion proteins to a target sequence that comprises a nucleotide to be deaminated.

[0485] In some embodiments, the cytidine deaminase is an apolipoprotein B mRNA-editing complex (APOBEC) family deaminase. In some embodiments, the cytidine deaminase is an APOBEC1 deaminase. In some embodiments, the cytidine deaminase is an APOBEC2 deaminase. In some embodiments, the cytidine deaminase is an APOBEC3 deaminase. In some embodiments, the cytidine deaminase is an APOBEC3A deaminase. In some embodiments, the cytidine deaminase is an APOBEC3B deaminase. In some embodiments, the cytidine deaminase is an APOBEC3C deaminase. In some embodiments, the cytidine deaminase is an APOBEC3D deaminase. In some embodiments, the cytidine deaminase is an APOBEC3E deaminase. In some embodiments, the cytidine deaminase is an APOBEC3F deaminase. In some embodiments, the cytidine deaminase is an APOBEC3G deaminase. In some embodiments, the cytidine deaminase is an APOBEC3H deaminase. In some embodiments, the cytidine deaminase is an APOBEC4 deaminase. In some embodiments, the cytidine deaminase is an activation-induced deaminase (AID). In some embodiments, the cytidine deaminase is a vertebrate cytidine deaminase. In some embodiments, the cytidine deaminase is an invertebrate cytidine deaminase. In some embodiments, the cytidine deaminase is a human, chimpanzee, gorilla, monkey, cow, dog, rat, or mouse deaminase. In some embodiments, the cytidine deaminase is a human cytidine deaminase. In some embodiments, the cytidine deaminase is a rat cytidine deaminase, e.g., rAPOBEC1. In some embodiments, the cytidine deaminase is a Petromyzon marinus cytidine deaminase 1 (pmCDA1). In some embodiments, the cytidine deaminase is a human APOBEC3G (SEQ ID NO: 19. In some embodiments, the cytidine deaminase is a fragment of the human APOBEC3G (SEQ ID NO: 19. In some embodiments, the deaminase is a human APOBEC3G variant comprising a D316R and D317R mutation relative to SEQ ID NO: 19. In some embodiments, the deaminase is a fragment of the human APOBEC3G and comprising mutations corresponding to the D316R and D317R mutations in SEQ ID NO: 19.

[0486] In some embodiments, the nucleic acid editing domain is at least 80%, at least 85%, at least 90%, at least 92%, at least 95%, at least 96%, at least 97%, at least 98%, at least 99%, or at least 99.5% identical to the deaminase domain of any one of SEQ ID NOs: 9-32. In some embodiments, the nucleic acid editing domain comprises the amino acid sequence of any one of SEQ ID NOs: 9-32.

[0487] Some exemplary suitable nucleic-acid editing domains, e.g., cytidine deaminases and cytidine deaminase domains, that can be fused to napDNAbps (e.g., Cas9 domains) according to aspects of this disclosure are provided below. It should be understood that, in some embodiments, the active domain of the respective sequence can be used, e.g., the domain without a localizing signal (nuclear localization sequence, without nuclear export signal, cytoplasmic localizing signal).

Human AID:
(SEQ ID NO: 9)
[sequence omitted]
(underline: nuclear localization sequence; double underline: nuclear export
signal)
Mouse AID:
(SEQ ID NO: 10)
MDSLLMKQKKFLYHFKNVRWAKGRHETYLCYVVKRRDSATSCSLDFGHLRNKSGCHVELLFLRYISDWDLDPGRC
YRVTWFTSWSPCYDCARHVAEFLRWNPNLSLRIFTARLYFCEDRKAEPEGLRRLHRAGVQIGIMTFKDYFYCWNT
FVENRERTFKAWEGLHENSVRLTRQLRRILLPLYEVDDLRDAFRMLGF
(underline: nuclear localization sequence; double underline: nuclear export
signal)
Dog AID:
(SEQ ID NO: 11)
MDSLLMKQRKFLYHFKNVRWAKGRHETYLCYVVKRRDSATSFSLDFGHLRNKSGCHVELLFLRYISDWDLDPGRC
YRVTWFTSWSPCYDCARHVADFLRGYPNLSLRIFAARLYFCEDRKAEPEGLRRLHRAGVQIAIMTFKDYFYCWNT
FVENREKTFKAWEGLHENSVRLSRQLRRILLPLYEVDDLRDAFRTLGL
(underline: nuclear localization sequence; double underline: nuclear export
signal)
Bovine AID:
(SEQ ID NO: 12)
MDSLLKKQRQFLYQFKNVRWAKGRHETYLCYVVKRRDSPTSFSLDFGHLRNKAGCHVELLFLRYISDWDLDPGRC
YRVTWFTSWSPCYDCARHVADFLRGYPNLSLRIFTARLYFCDKERKAEPEGLRRLHRAGVQIAIMTFKDYFYCWN
TFVENHERTFKAWEGLHENSVRLSRQLRRILLPLYEVDDLRDAFRTLGL
(underline: nuclear localization sequence; double underline: nuclear export
signal)
Rat AID:
(SEQ ID NO: 13)
MAVGSKPKAALVGPHWERERIWCFLCSTGLGTQQTGQTSRWLRPAATQDPVSPPRSLLMKQRKFLYHFKNVRWAK
GRHETYLCYVVKRRDSATSFSLDFGYLRNKSGCHVELLFLRYISDWDLDPGRCYRVTWFTSWSPCYDCARHVADF
LRGNPNLSLRIFTARLTGWGALPAGLMSPARPSDYFYCWNTFVENHERTFKAWEGLHENSVRLSRRLRRILLPLY
EVDDLRDAFRTLGL
(underline: nuclear localization sequence; double underline: nuclear export
signal)
Mouse APOBEC-3:
(SEQ ID NO: 14)
MGPFCLGCSHRKCYSPIRNLISQETFKFHFKNLGYAKGRKDTFLCYEVTRKDCDSPVSLHHGVFKNKDNIHAEIC
FLYWFHDKVLKVLSPREEFKITWYMSWSPCFECAEQIVRFLATHHNLSLDIFSSRLYNVQDPETQQNLCRLVQEG
AQVAAMDLYEFKKCWKKFVDNGGRRFRPWKRLLTNFRYQDSKLQEILRPCYIPVPSSSSSTLSNICLTKGLPETR
FCVEGRRMDPLSEEEFYSQFYNQRVKHLCYYHRMKPYLCYQLEQFNGQAPLKGCLLSEKGKQHAEILFLDKIRSM
ELSQVTITCYLTWSPCPNCAWQLAAFKRDRPDLILHIYTSRLYFHWKRPFQKGLCSLWQSGILVDVMDLPQFTDC
WTNFVNPKRPFWPWKGLEIISRRTQRRLRRIKESWGLQDLVNDFGNLQLGPPMS
(italic: nucleic acid editing domain)
Rat APOBEC-3:
(SEQ ID NO: 15)
MGPFCLGCSHRKCYSPIRNLISQETFKFHFKNLRYAIDRKDTFLCYEVTRKDCDSPVSLHHGVFKNKDNIHAEIC
FLYWFHDKVLKVLSPREEFKITWYMSWSPCFECAEQVLRFLATHHNLSLDIFSSRLYNIRDPENQQNLCRLVQEG
AQVAAMDLYEFKKCWKKFVDNGGRRFRPWKKLLTNFRYQDSKLQEILRPCYIPVPSSSSSTLSNICLTKGLPETR
FCVERRRVHLLSEEEFYSQFYNQRVKHLCYYHGVKPYLCYQLEQFNGQAPLKGCLLSEKGKQHAEILFLDKIRSM
ELSQVIITCYLTWSPCPNCAWQLAAFKRDRPDLILHIYTSRLYFHWKRPFQKGLCSLWQSGILVDVMDLPQFTDC
WTNFVNPKRPFWPWKGLEIISRRTQRRLHRIKESWGLQDLVNDFGNLQLGPPMS
(italic: nucleic acid editing domain)
Rhesus macaque APOBEC-3G:
(SEQ ID NO: 16)
MVEPMDPRTFVSNFNNRPILSGLNTVWLCCEVKTKDPSGPPLDAKIFQGKVYSKAKYHPEMRFLRWFHKWRQLHH
DQEYKVTWYVSWSPCTRCANSVATFLAKDPKVTLTIFVARLYYFWKPDYQQALRILCQKRGGPHATMKIMNYNEF
QDCWNKFVDGRGKPFKPRNNLPKHYTLLQATLGELLRHLMDPGTFTSNFNNKPWVSGQHETYLCYKVERLHNDTW
VPLNQHRGFLRNQAPNIHGFPKGRHAELCFLDLIPFWKLDGQQYRVTCFTSWSPCFSCAQEMAKFISNNEHVSLC
IFAARIYDDQGRYQEGLRALHRDGAKIAMMNYSEFEYCWDTFVDRQGRPFQPWDGLDEHSQALSGRLRAI
(italic: nucleic acid editing domain; underline: cytoplasmic localization
signal)
Chimpanzee APOBEC-3G:
(SEQ ID NO: 17)
MKPHFRNPVERMYQDTFSDNFYNRPILSHRNTVWLCYEVKTKGPSRPPLDAKIFRGQVYSKLKYHPEMRFFHWFS
KWRKLHRDQEYEVTWYISWSPCTKCTRDVATFLAEDPKVTLTIFVARLYYFWDPDYQEALRSLCQKRDGPRATMK
IMNYDEFQHCWSKFVYSQRELFEPWNNLPKYYILLHIMLGEILRHSMDPPTFTSNFNNELWVRGRHETYLCYEVE
RLHNDTWVLLNQRRGFLCNQAPHKHGFLEGRHAELCFLDVIPFWKLDLHQDYRVTCFTSWSPCFSCAQEMAKFIS
NNKHVSLCIFAARIYDDQGRCQEGLRTLAKAGAKISIMTYSEFKHCWDTFVDHQGCPFQPWDGLEEHSQALSGRL
RAILQNQGN
(italic: nucleic acid editing domain; underline: cytoplasmic localization
signal)
Green monkey APOBEC-3G:
(SEQ ID NO: 18)
MNPQIRNMVEQMEPDIFVYYFNNRPILSGRNTVWLCYEVKTKDPSGPPLDANIFQGKLYPEAKDHPEMKFLHWFR
KWRQLHRDQEYEVTWYVSWSPCTRCANSVATFLAEDPKVTLTIFVARLYYFWKPDYQQALRILCQERGGPHATMK
IMNYNEFQHCWNEFVDGQGKPFKPRKNLPKHYTLLHATLGELLRHVMDPGTFTSNFNNKPWVSGQRETYLCYKVE
RSHNDTWVLLNQHRGFLRNQAPDRHGFPKGRHAELCFLDLIPFWKLDDQQYRVTCFTSWSPCFSCAQKMAKFISN
NKHVSLCIFAARIYDDQGRCQEGLRTLHRDGAKIAVMNYSEFEYCWDTFVDRQGRPFQPWDGLDEHSQALSGRLR
AI
(italic: nucleic acid editing domain; underline: cytoplasmic localization
signal)
Human APOBEC-3G:
(SEQ ID NO: 19)
MKPHFRNTVERMYRDTFSYNFYNRPILSRRNTVWLCYEVKTKGPSRPPLDAKIFRGQVYSELKYHPEMRFFHWFS
KWRKLHRDQEYEVTWYISWSPCTKCTRDMATFLAEDPKVTLTIFVARLYYFWDPDYQEALRSLCQKRDGPRATMK
IMNYDEFQHCWSKFVYSQRELFEPWNNLPKYYILLHIMLGEILRHSMDPPTFTFNFNNEPWVRGRHETYLCYEVE
RMHNDTWVLLNQRRGFLCNQAPHKHGFLEGRHAELCFLDVIPFWKLDLDQDYRVTCFTSWSPCFSCAQEMAKFIS
KNKHVSLCIFTARIYDDQGRCQEGLRTLAEAGAKISIMTYSEFKHCWDTFVDHQGCPFQPWDGLDEHSQDLSGRL
RAILQNQEN
(italic: nucleic acid editing domain; underline: cytoplasmic localization
signal)
Human APOBEC-3F:
(SEQ ID NO: 20)
MKPHFRNTVERMYRDTFSYNFYNRPILSRRNTVWLCYEVKTKGPSRPRLDAKIFRGQVYSQPEHHAEMCFLSWFC
GNQLPAYKCFQITWFVSWTPCPDCVAKLAEFLAEHPNVTLTISAARLYYYWERDYRRALCRLSQAGARVKIMDDE
EFAYCWENFVYSEGQPFMPWYKFDDNYAFLHRTLKEILRNPMEAMYPHIFYFHFKNLRKAYGRNESWLCFTMEVV
KHHSPVSWKRGVFRNQVDPETHCHAERCFLSWFCDDILSPNTNYEVTWYTSWSPCPECAGEVAEFLARHSNVNLT
IFTARLYYFWDTDYQEGLRSLSQEGASVEIMGYKDFKYCWENFVYNDDEPFKPWKGLKYNFLFLDSKLQEILE
(italic: nucleic acid editing domain)
Human APOBEC-3B:
(SEQ ID NO: 21)
MNPQIRNPMERMYRDTFYDNFENEPILYGRSYTWLCYEVKIKRGRSNLLWDTGVFRGQVYFKPQYHAEMCFLSWF
CGNQLPAYKCFQITWFVSWTPCPDCVAKLAEFLSEHPNVTLTISAARLYYYWERDYRRALCRLSQAGARVTIMDY
EEFAYCWENFVYNEGQQFMPWYKFDENYAFLHRTLKEILRYLMDPDTFTFNFNNDPLVLRRRQTYLCYEVERLDN
GTWVLMDQHMGFLCNEAKNLLCGFYGRHAELRFLDLVPSLQLDPAQIYRVTWFISWSPCFSWGCAGEVRAFLQEN
THVRLRIFAARIYDYDPLYKEALQMLRDAGAQVSIMTYDEFEYCWDTFVYRQGCPFQPWDGLEEHSQALSGRLRA
ILQNQGN
(italic: nucleic acid editing domain)
Rat APOBEC-3B:
(SEQ ID NO: 22)
MQPQGLGPNAGMGPVCLGCSHRRPYSPIRNPLKKLYQQTFYFHFKNVRYAWGRKNNFLCYEVNGMDCALPVPLRQ
GVFRKQGHIHAELCFIYWFHDKVLRVLSPMEEFKVTWYMSWSPCSKCAEQVARFLAAHRNLSLAIFSSRLYYYLR
NPNYQQKLCRLIQEGVHVAAMDLPEFKKCWNKFVDNDGQPFRPWMRLRINFSFYDCKLQEIFSRMNLLREDVFYL
QFNNSHRVKPVQNRYYRRKSYLCYQLERANGQEPLKGYLLYKKGEQHVEILFLEKMRSMELSQVRITCYLTWSPC
PNCARQLAAFKKDHPDLILRIYTSRLYFYWRKKFQKGLCTLWRSGIHVDVMDLPQFADCWTNFVNPQRPFRPWNE
LEKNSWRIQRRLRRIKESWGL
Bovine APOBEC-3B:
(SEQ ID NO: 23)
DGWEVAFRSGTVLKAGVLGVSMTEGWAGSGHPGQGACVWTPGTRNTMNLLREVLFKQQFGNQPRVPAPYYRRKTY
LCYQLKQRNDLTLDRGCFRNKKQRHAEIRFIDKINSLDLNPSQSYKIICYITWSPCPNCANELVNFITRNNHLKL
EIFASRLYFHWIKSFKMGLQDLQNAGISVAVMTHTEFEDCWEQFVDNQSRPFQPWDKLEQYSASIRRRLQRILTA
PI
Chimpanzee APOBEC-3B:
(SEQ ID NO: 24)
MNPQIRNPMEWMYQRTFYYNFENEPILYGRSYTWLCYEVKIRRGHSNLLWDTGVFRGQMYSQPEHHAEMCFLSWF
CGNQLSAYKCFQITWFVSWTPCPDCVAKLAKFLAEHPNVTLTISAARLYYYWERDYRRALCRLSQAGARVKIMDD
EEFAYCWENFVYNEGQPFMPWYKFDDNYAFLHRTLKEIIRHLMDPDTFTFNFNNDPLVLRRHQTYLCYEVERLDN
GTWVLMDQHMGFLCNEAKNLLCGFYGRHAELRFLDLVPSLQLDPAQIYRVTWFISWSPCFSWGCAGQVRAFLQEN
THVRLRIFAARIYDYDPLYKEALQMLRDAGAQVSIMTYDEFEYCWDTFVYRQGCPFQPWDGLEEHSQALSGRLRA
ILQVRASSLCMVPHRPPPPPQSPGPCLPLCSEPPLGSLLPTGRPAPSLPFLLTASFSFPPPASLPPLPSLSLSPG
HLPVPSFHSLTSCSIQPPCSSRIRETEGWASVSKEGRDLG
Human APOBEC-3C:
(SEQ ID NO: 25)
MNPQIRNPMKAMYPGTFYFQFKNLWEANDRNETWLCFTVEGIKRRSVVSWKTGVFRNQVDSETHCHAERCFLSWF
CDDILSPNTKYQVTWYTSWSPCPDCAGEVAEFLARHSNVNLTIFTARLYYFQYPCYQEGLRSLSQEGVAVEIMDY
EDFKYCWENFVYNDNEPFKPWKGLKTNFRLLKRRLRESLQ
(italic: nucleic acid editing domain)
Gorilla APOBEC3C:
(SDQ ID NO: 26)
MNPQIRNPMKAMYPGTFYFQFKNLWEANDRNETWLCFTVEGIKRRSVVSWKTGVFRNQVDSETHCHAERCFLSWF
CDDILSPNTNYQVTWYTSWSPCPECAGEVAEFLARHSNVNLTIFTARLYYFQDTDYQEGLRSLSQEGVAVKIMDY
KDFKYCWENFVYNDDEPFKPWKGLKYNFRFLKRRLQEILE
(italic: nucleic acid editing domain)
Human APOBEC-3A:
(SEQ ID NO: 27)
MEASPASGPRHLMDPHIFTSNFNNGIGRHKTYLCYEVERLDNGTSVKMDQHRGFLHNQAKNLLCGFYGRHAELRF
LDLVPSLQLDPAQIYRVTWFISWSPCFSWGCAGEVRAFLQENTHVRLRIFAARIYDYDPLYKEALQMLRDAGAQV
SIMTYDEFKHCWDTFVDHQGCPFQPWDGLDEHSQALSGRLRAILQNQGN
(italic: nucleic acid editing domain)
Rhesus macaque APOBEC-3A:
(SEQ ID NO: 28)
MDGSPASRPRHLMDPNTFTFNFNNDLSVRGRHQTYLCYEVERLDNGTWVPMDERRGFLCNKAKNVPCGDYGCHVE
LRFLCEVPSWQLDPAQTYRVTWFISWSPCFRRGCAGQVRVFLQENKHVRLRIFAARIYDYDPLYQEALRTLRDAG
AQVSIMTYEEFKHCWDTFVDRQGRPFQPWDGLDEHSQALSGRLRAILQNQGN
(italic: nucleic acid editing domain)
Bovine APOBEC-3A:
(SEQ ID NO: 29)
MDEYTFTENFNNQGWPSKTYLCYEMERLDGDATIPLDEYKGFVRNKGLDQPEKPCHAELYFLGKIHSWNLDRNQH
YRLTCFISWSPCYDCAQKLTTFLKENHHISLHILASRIYTHNRFGCHQSGLCELQAAGARITIMTFEDFKHCWET
FVDHKGKPFQPWEGLNVKSQALCTELQAILKTQQN
(italic: nucleic acid editing domain)
Human APOBEC-3H:
(SEQ ID NO: 30)
MALLTAETFRLQFNNKRRLRRPYYPRKALLCYQLTPQNGSTPTRGYFENKKKCHAEICFINEIKSMGLDETQCYQ
VTCYLTWSPCSSCAWELVDFIKAHDHLNLGIFASRLYYHWCKPQQKGLRLLCGSQVPVEVMGFPKFADCWENFVD
HEKPLSFNPYKMLEELDKNSRAIKRRLERIKIPGVRAQGRYMDILCDAEV
(italic: nucleic acid editing domain)
Rhesus macaque APOBEC-3H:
(SEQ ID NO: 31)
MALLTAKTFSLQFNNKRRVNKPYYPRKALLCYQLTPQNGSTPTRGHLKNKKKDHAEIRFINKIKSMGLDETQCYQ
VTCYLTWSPCPSCAGELVDFIKAHRHLNLRIFASRLYYHWRPNYQEGLLLLCGSQVPVEVMGLPEFTDCWENFVD
HKEPPSFNPSEKLEELDKNSQAIKRRLERIKSRSVDVLENGLRSLQLGPVTPSSSIRNSR
Human APOBEC-3D:
(SEQ ID NO: 32)
MNPQIRNPMERMYRDTFYDNFENEPILYGRSYTWLCYEVKIKRGRSNLLWDTGVFRGPVLPKRQSNHRQEVYFRF
ENHAEMCFLSWFCGNRLPANRRFQITWFVSWNPCLPCVVKVTKFLAEHPNVTLTISAARLYYYRDRDWRWVLLRL
HKAGARVKIMDYEDFAYCWENFVCNEGQPFMPWYKFDDNYASLHRTLKEILRNPMEAMYPHIFYFHFKNLLKACG
RNESWLCFTMEVTKHHSAVFRKRGVFRNQVDPETHCHAERCFLSWFCDDILSPNTNYEVTWYTSWSPCPECAGEV
AEFLARHSNVNLTIFTARLCYFWDTDYQEGLCSLSQEGASVKIMGYKDFVSCWKNFVYSDDEPFKPWKGLQTNFR
LLKRRLREILQ
(italic: nucleic acid editing domain)
Human APOBEC-1:
(SEQ ID NO: 33)
MTSEKGPSTGDPTLRRRIEPWEFDVFYDPRELRKEACLLYEIKWGMSRKIWRSSGKNTTNHVEVNFIKKFTSERD
FHPSMSCSITWFLSWSPCWECSQAIREFLSRHPGVTLVIYVARLFWHMDQQNRQGLRDLVNSGVTIQIMRASEYY
HCWRNFVNYPPGDEAHWPQYPPLWMMLYALELHCIILSLPPCLKISRRWQNHLTFFRLHLQNCHYQTIPPHILLA
TGLIHPSVAWR
Mouse APOBEC-1:
(SEQ ID NO: 34)
MSSETGPVAVDPTLRRRIEPHEFEVFFDPRELRKETCLLYEINWGGRHSVWRHTSQNTSNHVEVNFLEKFTTERY
FRPNTRCSITWFLSWSPCGECSRAITEFLSRHPYVTLFIYIARLYHHTDQRNRQGLRDLISSGVTIQIMTEQEYC
YCWRNFVNYPPSNEAYWPRYPHLWVKLYVLELYCIILGLPPCLKILRRKQPQLTFFTITLQTCHYQRIPPHLLWA
TGLK
Rat APOBEC-1:
(SEQ ID NO: 35)
MSSETGPVAVDPTLRRRIEPHEFEVFFDPRELRKETCLLYEINWGGRHSIWRHTSQNTNKHVEVNFIEKFTTERY
FCPNTRCSITWFLSWSPCGECSRAITEFLSRYPHVTLFIYIARLYHHADPRNRQGLRDLISSGVTIQIMTEQESG
YCWRNFVNYSPSNEAHWPRYPHLWVRLYVLELYCIILGLPPCLNILRRKQPQLTFFTIALQSCHYQRLPPHILWA
TGLK
Human APOBEC-2:
(SEQ ID NO: 36)
MAQKEEAAVATEAASQNGEDLENLDDPEKLKELIELPPFEIVTGERLPANFFKFQFRNVE
YSSGRNKTFLCYVVEAQGKGGQVQASRGYLEDEHAAAHAEEAFFNTILPAFDPALRYNVTWYVSSSPCAACADRI
IKTLSKTKNLRLLILVGRLFMWEEPEIQAALKKLKEAGCKLRIMKPQDFEYVWQNFVEQEEGESKAFQPWEDIQE
NFLYYEEKLADILK
Mouse APOBEC-2:
(SEQ ID NO: 37)
MAQKEEAAEAAAPASQNGDDLENLEDPEKLKELIDLPPFEIVTGVRLPVNFFKFQFRNVEYSSGRNKTFLCYVVE
VQSKGGQAQATQGYLEDEHAGAHAEEAFFNTILPAFDPALKYNVTWYVSSSPCAACADRILKTLSKTKNLRLLIL
VSRLFMWEEPEVQAALKKLKEAGCKLRIMKPQDFEYIWQNFVEQEEGESKAFEPWEDIQENFLYYEEKLADILK
Rat APOBEC-2:
(SEQ ID NO: 38)
MAQKEEAAEAAAPASQNGDDLENLEDPEKLKELIDLPPFEIVTGVRLPVNFFKFQFRNVEYSSGRNKTFLCYVVE
AQSKGGQVQATQGYLEDEHAGAHAEEAFFNTILPAFDPALKYNVTWYVSSSPCAACADRILKTLSKTKNLRLLIL
VSRLFMWEEPEVQAALKKLKEAGCKLRIMKPQDFEYLWQNFVEQEEGESKAFEPWEDIQENFLYYEEKLADILK
Bovine APOBEC-2:
(SEQ ID NO: 39)
MAQKEEAAAAAEPASQNGEEVENLEDPEKLKELIELPPFEIVTGERLPAHYFKFQFRNVE
YSSGRNKTFLCYVVEAQSKGGQVQASRGYLEDEHATNHAEEAFFNSIMPTFDPALRYMVTWYVSSSPCAACADRI
VKTLNKTKNLRLLILVGRLFMWEEPEIQAALRKLKEAGCRLRIMKPQDFEYIWQNFVEQEEGESKAFEPWEDIQE
NFLYYEEKLADILK
Petromyzon marinus CDA1 (pmCDA1):
(SEQ ID NO: 40)
MTDAEYVRIHEKLDIYTFKKQFFNNKKSVSHRCYVLFELKRRGERRACFWGYAVNKPQSGTERGIHAEIFSIRKV
EEYLRDNPGQFTINWYSSWSPCADCAEKILEWYNQELRGNGHTLKIWACKLYYEKNARNQIGLWNLRDNGVGLNV
MVSEHYQCCRKIFIQSSHNQLNENRWLEKTLKRAEKRRSELSIMIQVKILHTTKSPAV
Human APOBEC3G D316R_D317R:
(SEQ ID NO: 41)
MKPHFRNTVERMYRDTFSYNFYNRPILSRRNTVWLCYEVKTKGPSRPPLDAKIFRGQVYSELKYHPEMRFFHWFS
KWRKLHRDQEYEVTWYISWSPCTKCTRDMATFLAEDPKVTLTIFVARLYYFWDPDYQEALRSLCQKRDGPRATMK
IMNYDEFQHCWSKFVYSQRELFEPWNNLPKYYILLHIMLGEILRHSMDPPTFTFNFNNEPWVRGRHETYLCYEVE
RMHNDTWVLLNQRRGFLCNQAPHKHGFLEGRHAELCFLDVIPFWKLDLDQDYRVTCFTSWSPCFSCAQEMAKFIS
KNKHVSLCIFTARIYRRQGRCQEGLRTLAEAGAKISIMTYSEFKHCWDTFVDHQGCPFQPWDGLDEHSQDLSGRL
RAILQNQEN
Human APOBEC3G chain A:
(SEQ ID NO: 42)
MDPPTFTFNFNNEPWVRGRHETYLCYEVERMHNDTWVLLNQRRGFLCNQAPHKHGFLEGRHAELCFLDVIPFWKL
DLDQDYRVTCFTSWSPCFSCAQEMAKFISKNKHVSLCIFTARIYDDQGRCQEGLRTLAEAGAKISIMTYSEFKHC
WDTFVDHQGCPFQPWDGLDEHSQDLSGRLRAILQ
Human APOBEC3G chain A D120R_D121R:
(SEQ ID NO: 43)
MDPPTFTFNFNNEPWVRGRHETYLCYEVERMHNDTWVLLNQRRGFLCNQAPHKHGFLEGRHAELCFLD
VIPFWKLDLDQDYRVTCFTSWSPCFSCAQEMAKFISKNKHVSLCIFTARIYRRQGRCQEGLRTLAEAGAKISIMT
YSEFKHCWDTFVDHQGCPFQPWDGLDEHSQDLSGRLRAILQ

[0488] Any of the aforementioned DNA effector domains may be subjected to a continuous evolution process (e.g., PACE) or may be otherwise further evolved using a mutagenesis methodology known in the art.

[0489] In some embodiments, the cytidine deaminase is an apolipoprotein B mRNA-editing complex (APOBEC) family deaminase. In some embodiments, the deaminase is an APOBEC1 deaminase. In some embodiments, the deaminase is an APOBEC2 deaminase. In some embodiments, the deaminase is an APOBEC3 deaminase. In some embodiments, the deaminase is an APOBEC3A deaminase. In some embodiments, the deaminase is an APOBEC3B deaminase. In some embodiments, the deaminase is an APOBEC3C deaminase. In some embodiments, the deaminase is an APOBEC3D deaminase. In some embodiments, the deaminase is an APOBEC3E deaminase. In some embodiments, the deaminase is an APOBEC3F deaminase. In some embodiments, the deaminase is an APOBEC3G deaminase. In some embodiments, the deaminase is an APOBEC3H deaminase. In some embodiments, the deaminase is an APOBEC4 deaminase. In some embodiments, the deaminase is an activation-induced deaminase (AID). In some embodiments, the deaminase is a vertebrate deaminase. In some embodiments, the deaminase is an invertebrate deaminase. In some embodiments, the deaminase is a human, chimpanzee, gorilla, monkey, cow, dog, rat, or mouse deaminase. In some embodiments, the deaminase is a human deaminase. In some embodiments, the deaminase is a rat deaminase, e.g., rAPOBEC1.

[0490] Some aspects of the disclosure are based on the recognition that modulating the deaminase domain catalytic activity of any of the fusion proteins provided herein, for example by making point mutations in the deaminase domain, affect the processivity of the fusion proteins (e.g., base editors). For example, mutations that reduce, but do not eliminate, the catalytic activity of a deaminase domain within a base editing fusion protein can make it less likely that the deaminase domain will catalyze the deamination of a residue adjacent to a target residue, thereby narrowing the deamination window. The ability to narrow the deamination window may prevent unwanted deamination of residues adjacent of specific target residues, which may decrease or prevent off-target effects.

[0491] In some embodiments, any of the fusion proteins provided herein comprise a deaminase domain (e.g., a cytidine deaminase domain) that has reduced catalytic deaminase activity. In some embodiments, any of the fusion proteins provided herein comprise a deaminase domain (e.g., a cytidine deaminase domain) that has a reduced catalytic deaminase activity as compared to an appropriate control. For example, the appropriate control may be the deaminase activity of the deaminase prior to introducing one or more mutations into the deaminase. In other embodiments, the appropriate control may be a wild-type deaminase. In some embodiments, the appropriate control is a wild-type apolipoprotein B mRNA-editing complex (APOBEC) family deaminase. In some embodiments, the appropriate control is an APOBEC1 deaminase, an APOBEC2 deaminase, an APOBEC3A deaminase, an APOBEC3B deaminase, an APOBEC3C deaminase, an APOBEC3D deaminase, an APOBEC3F deaminase, an APOBEC3G deaminase, or an APOBEC3H deaminase. In some embodiments, the appropriate control is an activation induced deaminase (AID). In some embodiments, the appropriate control is a cytidine deaminase 1 from Petromyzon marinus (pmCDA1). In some embodiments, the deaminse domain may be a deaminase domain that has at least 1%, at least 5%, at least 15%, at least 20%, at least 25%, at least 30%, at least 40%, at least 50%, at least 60%, at least 70%, at least 80%, at least 90%, or at least 95% less catalytic deaminase activity as compared to an appropriate control.

[0492] The apolipoprotein B mRNA-editing complex (APOBEC) family of cytidine deaminase enzymes encompasses eleven proteins that serve to initiate mutagenesis in a controlled and beneficial manner. One family member, activation-induced cytidine deaminase (AID), is responsible for the maturation of antibodies by converting cytosines in ssDNA to uracils in a transcription-dependent, strand-biased fashion. The apolipoprotein B editing complex 3 (APOBEC3) enzyme provides protection to human cells against a certain HIV-1 strain via the deamination of cytosines in reverse-transcribed viral ssDNA. These proteins all require a Zn2+-coordinating motif (His-X-Glu-X23-26-Pro-Cys-X2-4-Cys; (SEQ ID NO: 402) and bound water molecule for catalytic activity. The Glu residue acts to activate the water molecule to a zinc hydroxide for nucleophilic attack in the deamination reaction. Each family member preferentially deaminates at its own particular “hotspot”, ranging from WRC (W is A or T, R is A or G) for hAID, to TTC for hAPOBEC3F. A recent crystal structure of the catalytic domain of APOBEC3G revealed a secondary structure comprised of a five-stranded β-sheet core flanked by six α-helices, which is believed to be conserved across the entire family. The active center loops have been shown to be responsible for both ssDNA binding and in determining “hotspot” identity. Overexpression of these enzymes has been linked to genomic instability and cancer, thus highlighting the importance of sequence-specific targeting.

[0493] Some aspects of this disclosure relate to the recognition that the activity of cytidine deaminase enzymes such as APOBEC enzymes can be directed to a specific site in genomic DNA. Without wishing to be bound by any particular theory, advantages of using Cas9 as a recognition agent include (1) the sequence specificity of Cas9 can be easily altered by simply changing the sgRNA sequence; and (2) Cas9 binds to its target sequence by denaturing the dsDNA, resulting in a stretch of DNA that is single-stranded and therefore a viable substrate for the deaminase. It should be understood that other catalytic domains, or catalytic domains from other deaminases, can also be used to generate fusion proteins with Cas9, and that the disclosure is not limited in this regard.

[0494] Some aspects of this disclosure are based on the recognition that Cas9:deaminase fusion proteins can efficiently deaminate nucleotides. In view of the results provided herein regarding the nucleotides that can be targeted by Cas9:deaminase fusion proteins, a person of skill in the art will be able to design suitable guide RNAs to target the fusion proteins to a target sequence that comprises a nucleotide to be deaminated.

[0495] In certain embodiments, the reference cytidine deaminase domain comprises a “FERNY” polypeptide having an amino acid sequence according to SEQ ID NO: 376 or an amino acid sequence that is at least 60%, 65%, 70%, 75%, 80%, 85%, 90%, 95, 98%, 99%, or 99.5% identical to SEQ ID NO: 376, as follows:

(SEQ ID NO: 376)
MFERNYDPRELRKETYLLYEIKWGKSGKLWRHWCQNNRTQHAEVYFLENIF
NARRFNPSTHCSITWYLSWSPCAECSQKIVDFLKEHPNVNLEIYVARLYYH
EDERNRQGLRDLVNSGVTIRIMDLPDYNYCWKTFVSDQGGDEDYWPGHFAP
WIKQYSLKL

[0496] In certain other embodiment, the evolved cytidine deaminase domain (i.e., as a result of the continuous evolution process described herein) comprises a “evoFERNY” polypeptide having an amino acid sequence according to SEQ ID NO: 377 or an amino acid sequence that is at least 60%, 65%, 70%, 75%, 80%, 85%, 90%, 95, 98%, 99%, or 99.5% identical to SEQ ID NO: 377, comprising an H102P and D104N substitutions, as follows:

(SEQ ID NO: 377)
MFERNYDPRELRKETYLLYEIKWGKSGKLWRHWCQNNRTQHAEVYFLENIF
NARRFNPSTHCSITWYLSWSPCAECSQKIVDFLKEHPNVNLEIYVARLYYP
ENERNRQGLRDLVNSGVTIRIMDLPDYNYCWKTFVSDQGGDEDYWPGHFAP
WIKQYSLKL

[0497] In other embodiments, the reference cytidine deaminase domain comprises a “Rat APOBEC-1” polypeptide having an amino acid sequence according to SEQ ID NO: 378 or an amino acid sequence that is at least 60%, 65%, 70%, 75%, 80%, 85%, 90%, 95, 98%, 99%, or 99.5% identical to SEQ ID NO: 378, as follows:

(SEQ ID NO: 378)
[sequence omitted]

[0498] In certain other embodiment, the evolved cytidine deaminase domain (i.e., as a result of the continuous evolution process described herein) comprises a “evoAPOBEC” polypeptide having an amino acid sequence according to SEQ ID NO: 379 or an amino acid sequence that is at least 60%, 65%, 70%, 75%, 80%, 85%, 90%, 95, 98%, 99%, or 99.5% identical to SEQ ID NO: 379, and comprising substitutions E4K; H109N; H122L; D124N; R154H; A1655; P2015; F2055, as follows:

(SEQ ID NO: 379)
MSSKTGPVAVDPTLRRRIEPHEFEVFFDPRELRKETCLLYEINWGGRHSIW
RHTSQNTNKHVEVNFIEKFTTERYFCPNTRCSITWFLSWSPCGECSRAITE
FLSRYPNVTLFIYIARLYHLANPRNRQGLRDLISSGVTIQIMTEQESGYCW
HNFVNYSPSNESHWPRYPHLWVRLYVLELYCIILGLPPCLNILRRKQSQLT
SFTIALQSCHYQRLPPHILWATGLK

[0499] In still other embodiments, the reference cytidine deaminase domain comprises a “Petromyzon marinus CDA1 (pmCDA1)” polypeptide having an amino acid sequence according to SEQ ID NO: 380 or an amino acid sequence that is at least 60%, 65%, 70%, 75%, 80%, 85%, 90%, 95, 98%, 99%, or 99.5% identical to SEQ ID NO: 380, as follows:

(SEQ ID NO: 380)
MTDAEYVRIHEKLDIYTFKKQFFNNKKSVSHRCYVLFELKRRGERRACFWG
YAVNKPQSGTERGIHAEIFSIRKVEEYLRDNPGQFTINWYSSWSPCADCAE
KILEWYNQELRGNGHTLKIWACKLYYEKNARNQIGLWNLRDNGVGLNVMVS
EHYQCCRKIFIQSSHNQLNENRWLEKTLKRAEKRRSELSIMIQVKILHTTK
SPAV

[0500] In other embodiment, the evolved cytidine deaminase domain (i.e., as a result of the continuous evolution process described herein) comprises a “evoCDA” polypeptide having an amino acid sequence according to SEQ ID NO: 381 or an amino acid sequence that is at least 60%, 65%, 70%, 75%, 80%, 85%, 90%, 95, 98%, 99%, or 99.5% identical to SEQ ID NO: 381 and comprising substitutions F23S; A123V; I195F, as follows:

(SEQ ID NO: 381)
MTDAEYVRIHEKLDIYTFKKQFSNNKKSVSHRCYVLFELKRRGERRACFWG
YAVNKPQSGTERGIHAEIFSIRKVEEYLRDNPGQFTINWYSSWSPCADCAE
KILEWYNQELRGNGHTLKIWVCKLYYEKNARNQIGLWNLRDNGVGLNVMVS
EHYQCCRKIFIQSSHNQLNENRWLEKTLKRAEKRRSELSIMFQVKILHTTK
SPAV

[0501] In yet other embodiments, the reference cytidine deaminase domain comprises a “Anc689 APOBEC” polypeptide having an amino acid sequence according to SEQ ID NO: 382 or an amino acid sequence that is at least 60%, 65%, 70%, 75%, 80%, 85%, 90%, 95, 98%, 99%, or 99.5% identical to SEQ ID NO: 382, as follows:

(SEQ ID NO: 382)
MSSETGPVAVDPTLRRRIEPHEFEVFFDPRELRKETCLLYEIKWGTSHKIW
RHSSKNTTKHVEVNFIEKFTSERHFCPSTSCSITWFLSWSPCGECSKAITE
FLSQHPNVTLVIYVARLYHHMDQQNRQGLRDLVNSGVTIQIMTAPEYDYCW
RNFVNYPPGKEAHWPRYPPLWMKLYALELHAGILGLPPCLNILRRKQPQLT
FFTIALQSCHYQRLPPHILWATGLK

[0502] In other embodiments, the evolved cytidine deaminase domain (i.e., as a result of the continuous evolution process described herein) comprises a “evoAnc689 APOBEC” polypeptide having an amino acid sequence according to SEQ ID NO: 383 or an amino acid sequence that is at least 60%, 65%, 70%, 75%, 80%, 85%, 90%, 95, 98%, 99%, or 99.5% identical to SEQ ID NO: 383 and comprising substitutions E4K; H122L; D124N; R154H; A1655; P2015; F2055, as follows:

(SEQ ID NO: 383)
MSSKTGPVAVDPTLRRRIEPHEFEVFFDPRELRKETCLLYEIKWGTSHKIW
RHSSKNTTKHVEVNFIEKFTSERHFCPSTSCSITWFLSWSPCGECSKAITE
FLSQHPNVTLVIYVARLYHLMNQQNRQGLRDLVNSGVTIQIMTAPEYDYCW
HNFVNYPPGKESHWPRYPPLWMKLYALELHAGILGLPPCLNILRRKQSQLT
SFTIALQSCHYQRLPPHILWATGLK

[0503] In some aspects, the specification provides evolved cytidine deaminases which are used to construct base editors that have improved properties. For example, evolved cytidine deaminases, such as those provided herein, are capable of improving base editing efficiency and/or improving the ability of base editors to more efficiently edit bases regardless of the surrounding sequence. For example, in some aspects the disclosure provides evolved APOBEC deaminases (e.g., evolved rAPOBEC1) with improved base editing efficiency in the context of a 5′-G-3′ when it is 5′ to a target base (e.g., C). In some embodiments, the disclosure provides base editors comprising any of the evolved cytidine deaminases provided herein. It should be appreciated that any of the evolved cytidine deaminases provided herein may be used as a deaminase in a base editor protein, such as any of the base editors provided herein.

### Nuclear Localization Signal

[0504] In some embodiments, the fusion proteins provided herein further comprise one or more nuclear targeting sequences, for example, a nuclear localization sequence (NLS). In some embodiments, a NLS comprises an amino acid sequence that facilitates the importation of a protein, that comprises an NLS, into the cell nucleus (e.g., by nuclear transport). In some embodiments, any of the fusion proteins provided herein further comprise a nuclear localization sequence (NLS). In some embodiments, the NLS is fused to the N-terminus of the fusion protein. In some embodiments, the NLS is fused to the C-terminus of the fusion protein. In some embodiments, the NLS is fused to the C-terminus of the napDNAbp. In some embodiments, the NLS is fused to the N-terminus of the adenosine deaminase. In some embodiments, the NLS is fused to the C-terminus of the adenosine deaminase. In some embodiments, the NLS is fused to the fusion protein via one or more linkers. In some embodiments, the NLS is fused to the fusion protein without a linker. In some embodiments, the NLS comprises an amino acid sequence of any one of the NLS sequences provided or referenced herein. In some embodiments, the NLS comprises an amino acid sequence as set forth in SEQ ID NO: 117 or SEQ ID NO: 118. Additional nuclear localization sequences are known in the art and would be apparent to the skilled artisan. For example, NLS sequences are described in Plank et al., PCT/EP2000/011690, the contents of which are incorporated herein by reference for their disclosure of exemplary nuclear localization sequences. In some embodiments, a NLS comprises the amino acid sequence

(SEQ ID NO: 82)
PKKKRKV,
(SEQ ID NO: 83)
MDSLLMNRRKFLYQFKNVRWAKGRRETYLC,
(SEQ ID NO: 84)
KRTADGSEFESPKKKRKV,
or
(SEQ ID NO: 85)
KRTADGSEFEPKKKRKV.

| | | SEQUENCE |
|---|---|---|
| DESCRIPTION | SEQUENCE | IDENTIFIER |
| NLS OF | VSRKRPRP | 384 |
| POLYOMA | | |
| LARGE T-AG | | |
| NLS OF C- | PAAKRVKLD | 385 |
| MYC | | |
| NLS OF TUS- | KLKIKRPVK | 386 |
| PROTEIN | | |
| NLS OF | EGAPPAKRAR | 387 |
| HEPATITIS D | | |
| VIRUS | | |
| ANTIGEN | | |
| NLS OF | PPQPKKKPLDGE | 388 |
| MURINE P53 | | |
| NLS | MKRTADGSEFESPKKKRKV | 389 |
| NLS OF | AVKRPAATKKAGQAKKKKLD | 390 |
| NUCLEOPLASM | | |
| IN | | |
| NLS | SGGSKRTADGSEFEPKKKRKV | 391 |
| NLS OF EGL- | MSRRRKANPTKLSENAKKLAKEVEN | 392 |
| 13 | | |

[0505] The NLS examples above are non-limiting. The fusion proteins may comprise any known NLS sequence, including any of those described in Cokol et al., “Finding nuclear localization signals,” EMBO Rep., 2000, 1(5): 411-415 and Freitas et al., “Mechanisms and Signals for the Nuclear Import of Proteins,” Current Genomics, 2009, 10(8): 550-7, each of which are incorporated herein by reference.

### Linkers

[0506] In certain embodiments, linkers may be used to link any of the peptides or peptide domains or domains of the disclosure (e.g., domain A covalently linked to domain B which is covalently linked to domain C). For example, a linker may be used to link together a C-terminal fragment of Cas9 to a N-terminal fragment of Cas9 in the N- to C-terminal orientation to form a circular permutant variant of Cas9. In another example, a linker may be used to link together a Cas9 domain (e.g., a circular permutant Cas9 or a Cas9 with modified PAM specificity) with a cytidine deaminase or an adenosine deaminase, or with another functional domain (e.g., an NLS or UGI domain).

[0507] As defined above, the term “linker,” as used herein, refers to a chemical group or a molecule linking two molecules or domains, e.g., a binding domain and a cleavage domain of a nuclease. In some embodiments, a linker joins a gRNA binding domain of a napDNAbp nuclease and the catalytic domain of a recombinase. In some embodiments, a linker joins a dCas9 and base editor domain (e.g., an oxidase). Typically, the linker is positioned between, or flanked by, two groups, molecules, or other domains and connected to each one via a covalent bond, thus connecting the two. In some embodiments, the linker is an amino acid or a plurality of amino acids (e.g., a peptide or protein). In some embodiments, the linker is an organic molecule, group, polymer, or chemical domain. Chemical domains include, but are not limited to, disulfide, hydrazone, thiol and azo domains. In some embodiments, the linker is 5-100 amino acids in length, for example, 5, 6, 7, 8, 9, 10, 11, 12, 13, 14, 15, 16, 17, 18, 19, 20, 21, 22, 23, 24, 25, 26, 27, 28, 29, 30, 30-35, 35-40, 40-45, 45-50, 50-60, 60-70, 70-80, 80-90, 90-100, 100-150, or 150-200 amino acids in length. In some embodiments, the linker is a single atom, or a single angstrom, in length. Longer or shorter linkers are also contemplated.

[0508] In some other embodiments, the linker comprises the amino acid sequence (GGGGS)ₙ (SEQ ID NO: 105), (G)ₙ (SEQ ID NO: 106), (EAAAK)ₙ (SEQ ID NO: 107), (GGS)ₙ (SEQ ID NO: 108), (SGGS)ₙ (SEQ ID NO: 109), (XP)ₙ (SEQ ID NO: 110), or any combination thereof, wherein n is independently an integer between 1 and 30, and wherein X is any amino acid. In some embodiments, the linker comprises the amino acid sequence (GGS)ₙ (SEQ ID NO: 111), wherein n is 1, 3, or 7. In some embodiments, the linker comprises the amino acid sequence SGSETPGTSESATPES (SEQ ID NO: 112) (i.e., the XTEN linker). In some embodiments, the linker comprises the amino acid sequence SGGSSGGSSGSETPGTSESATPESSGGSSGGS (SEQ ID NO: 113). In some embodiments, the linker comprises the amino acid sequence SGGSGGSGGS (SEQ ID NO: 114). In some embodiments, the linker comprises the amino acid sequence SGGS (SEQ ID NO: 115).

[0509] Other linker sequences may include:

(SEQ ID NO: 384)
(SGGS)2-SGSETPGTSESATPES-(SGGS)2;
(SEQ ID NO: 385)
(SGGS)n-SGSETPGTSESATPES-(SGGS)n;
(SEQ ID NO: 386)
SGGS;
(SEQ ID NO: 387)
(GGGS)n;
(SEQ ID NO: 388)
(GGGGS)n;
(SEQ ID NO: 389)
(G)n;
(SEQ ID NO: 390)
(XP)n;
(SEQ ID NO: 391)
SGGSSGGSSGSETPGTSESATPESSGGSSGGS;
(SEQ ID NO: 392)
GGSGGSPGSPAGSPTSTEEGTSESATPESGPGTSTEPSEGSAPGSPAGSPT
STEEGTSTEPSEGSAPGTSTEPSEGSAPGTSESATPESGPGSEPATSGGSG
GS;
(SEQ ID NO: 393)
SGGSSGGSSGSETPGTSESATPESSGGSSGGSSGGSSGGSSGSETPGTSES
ATPESSGGSSGGS;
(SEQ ID NO: 394)
SGGSSGGSSGSETPGTSESATPESSGGSSGGSSGGSSGGS;
and
(SEQ ID NO: 395)
PGSPAGSPTSTEEGTSESATPESGPGTSTEPSEGSAPGSPAGSPTSTEEGT
STEPSEGSAPGTSTEPSEGSAPGTSESATPESGPGSEPATS.

[0510] The linker may be as simple as a covalent bond, or it may be a polymeric linker many atoms in length. In certain embodiments, the linker is a polypeptide or based on amino acids. In other embodiments, the linker is not peptide-like. In certain embodiments, the linker is a covalent bond (e.g., a carbon-carbon bond, disulfide bond, carbon-heteroatom bond, etc.). In certain embodiments, the linker is a carbon-nitrogen bond of an amide linkage. In certain embodiments, the linker is a cyclic or acyclic, substituted or unsubstituted, branched or unbranched aliphatic or heteroaliphatic linker. In certain embodiments, the linker is polymeric (e.g., polyethylene, polyethylene glycol, polyamide, polyester, etc.). In certain embodiments, the linker comprises a monomer, dimer, or polymer of aminoalkanoic acid. In certain embodiments, the linker comprises an aminoalkanoic acid (e.g., glycine, ethanoic acid, alanine, beta-alanine, 3-aminopropanoic acid, 4-aminobutanoic acid, 5-pentanoic acid, etc.). In certain embodiments, the linker comprises a monomer, dimer, or polymer of aminohexanoic acid (Ahx). In certain embodiments, the linker is based on a carbocyclic domain (e.g., cyclopentane, cyclohexane). In other embodiments, the linker comprises a polyethylene glycol domain (PEG). In other embodiments, the linker comprises amino acids. In certain embodiments, the linker comprises a peptide. In certain embodiments, the linker comprises an aryl or heteroaryl domain. In certain embodiments, the linker is based on a phenyl ring. The linker may include functionalized domains to facilitate attachment of a nucleophile (e.g., thiol, amino) from the peptide to the linker. Any electrophile may be used as part of the linker. Exemplary electrophiles include, but are not limited to, activated esters, activated amides, Michael acceptors, alkyl halides, aryl halides, acyl halides, and isothiocyanates.

### UGI Domain

[0511] In other embodiments, the base editors described herein may comprise one or more uracil glycosylase inhibitors. The term “uracil glycosylase inhibitor” or “UGI,” as used herein, refers to a protein that is capable of inhibiting a uracil-DNA glycosylase base-excision repair enzyme. In some embodiments, a UGI domain comprises a wild-type UGI or a UGI as set forth in SEQ ID NO: 313. In some embodiments, the UGI proteins provided herein include fragments of UGI and proteins homologous to a UGI or a UGI fragment. For example, in some embodiments, a UGI domain comprises a fragment of the amino acid sequence set forth in SEQ ID NO: 313. In some embodiments, a UGI fragment comprises an amino acid sequence that comprises at least 60%, at least 65%, at least 70%, at least 75%, at least 80%, at least 85%, at least 90%, at least 95%, at least 96%, at least 97%, at least 98%, at least 99%, or at least 99.5% of the amino acid sequence as set forth in SEQ ID NO: 313. In some embodiments, a UGI comprises an amino acid sequence homologous to the amino acid sequence set forth in SEQ ID NO: 313, or an amino acid sequence homologous to a fragment of the amino acid sequence set forth in SEQ ID NO: 313. In some embodiments, proteins comprising UGI or fragments of UGI or homologs of UGI or UGI fragments are referred to as “UGI variants.” A UGI variant shares homology to UGI, or a fragment thereof. For example a UGI variant is at least 70% identical, at least 75% identical, at least 80% identical, at least 85% identical, at least 90% identical, at least 95% identical, at least 96% identical, at least 97% identical, at least 98% identical, at least 99% identical, at least 99.5% identical, or at least 99.9% identical to a wild type UGI or a UGI as set forth in SEQ ID NO: 313. In some embodiments, the UGI variant comprises a fragment of UGI, such that the fragment is at least 70% identical, at least 80% identical, at least 90% identical, at least 95% identical, at least 96% identical, at least 97% identical, at least 98% identical, at least 99% identical, at least 99.5% identical, or at least 99.9% to the corresponding fragment of wild-type UGI or a UGI as set forth in SEQ ID NO: 313. In some embodiments, the UGI comprises the following amino acid sequence:

Uracil-DNA glycosylase inhibitor:
>sp|P14739|UNGI_BPPB2
(SEQ ID NO: 313)
MTNLSDIIEKETGKQLVIQESILMLPEEVEEVIGNKPESDILVHTAYDEST
DENVMLLTSDAPEYKPWALVIQDSNGENKIKML.

[0512] The base editors described herein may comprise more than one UGI domain, which may be separated by one or more linkers as described herein.

### Split-Intein/Intein Domains

[0513] It will be understood that in some embodiments (e.g., delivery of a base editor in vivo using AAV particles), it may be advantageous to split a polypeptide (e.g., a deaminase or a napDNAbp) or a fusion protein (e.g., a base editor) into an N-terminal half and a C-terminal half, delivery them separately, and then allow their colocalization to reform the complete protein (or fusion protein as the case may be) within the cell. Separate halves of a protein or a fusion protein may each comprise a split-intein tag to facilitate the reformation of the complete protein or fusion protein by the mechanism of protein trans splicing.

[0514] Protein trans-splicing, catalyzed by split inteins, provides an entirely enzymatic method for protein ligation. A split-intein is essentially a contiguous intein (e.g. a mini-intein) split into two pieces named N-intein and C-intein, respectively. The N-intein and C-intein of a split intein can associate non-covalently to form an active intein and catalyze the splicing reaction essentially in same way as a contiguous intein does. Split inteins have been found in nature and also engineered in laboratories. As used herein, the term “split intein” refers to any intein in which one or more peptide bond breaks exists between the N-terminal and C-terminal amino acid sequences such that the N-terminal and C-terminal sequences become separate molecules that can non-covalently reassociate, or reconstitute, into an intein that is functional for trans-splicing reactions. Any catalytically active intein, or fragment thereof, may be used to derive a split intein for use in the methods of the invention. For example, in one aspect the split intein may be derived from a eukaryotic intein. In another aspect, the split intein may be derived from a bacterial intein. In another aspect, the split intein may be derived from an archaeal intein. Preferably, the split intein so-derived will possess only the amino acid sequences essential for catalyzing trans-splicing reactions.

[0515] As used herein, the “N-terminal split intein (In)” refers to any intein sequence that comprises an N-terminal amino acid sequence that is functional for trans-splicing reactions. An In thus also comprises a sequence that is spliced out when trans-splicing occurs. An In can comprise a sequence that is a modification of the N-terminal portion of a naturally occurring intein sequence. For example, an In can comprise additional amino acid residues and/or mutated residues so long as the inclusion of such additional and/or mutated residues does not render the In non-functional in trans-splicing. Preferably, the inclusion of the additional and/or mutated residues improves or enhances the trans-splicing activity of the In.

[0516] As used herein, the “C-terminal split intein (Ic)” refers to any intein sequence that comprises a C-terminal amino acid sequence that is functional for trans-splicing reactions. In one aspect, the Ic comprises 4 to 7 contiguous amino acid residues, at least 4 amino acids of which are from the last β-strand of the intein from which it was derived. An Ic thus also comprises a sequence that is spliced out when trans-splicing occurs. An Ic can comprise a sequence that is a modification of the C-terminal portion of a naturally occurring intein sequence. For example, an Ic can comprise additional amino acid residues and/or mutated residues so long as the inclusion of such additional and/or mutated residues does not render the In non-functional in trans-splicing. Preferably, the inclusion of the additional and/or mutated residues improves or enhances the trans-splicing activity of the Ic.

[0517] In some embodiments of the invention, a peptide linked to an Ic or an In can comprise an additional chemical moiety including, among others, fluorescence groups, biotin, polyethylene glycol (PEG), amino acid analogs, unnatural amino acids, phosphate groups, glycosyl groups, radioisotope labels, and pharmaceutical molecules. In other embodiments, a peptide linked to an Ic can comprise one or more chemically reactive groups including, among others, ketone, aldehyde, Cys residues and Lys residues. The N-intein and C-intein of a split intein can associate non-covalently to form an active intein and catalyze the splicing reaction when an “intein-splicing polypeptide (ISP)” is present. As used herein, “intein-splicing polypeptide (ISP)” refers to the portion of the amino acid sequence of a split intein that remains when the Ic, In, or both, are removed from the split intein. In certain embodiments, the In comprises the ISP. In another embodiment, the Ic comprises the ISP. In yet another embodiment, the ISP is a separate peptide that is not covalently linked to In nor to Ic.

[0518] Split inteins may be created from contiguous inteins by engineering one or more split sites in the unstructured loop or intervening amino acid sequence between the −12 conserved beta-strands found in the structure of mini-inteins. Some flexibility in the position of the split site within regions between the beta-strands may exist, provided that creation of the split will not disrupt the structure of the intein, the structured beta-strands in particular, to a sufficient degree that protein splicing activity is lost.

[0519] In protein trans-splicing, one precursor protein consists of an N-extein part followed by the N-intein, another precursor protein consists of the C-intein followed by a C-extein part, and a trans-splicing reaction (catalyzed by the N- and C-inteins together) excises the two intein sequences and links the two extein sequences with a peptide bond. Protein trans-splicing, being an enzymatic reaction, can work with very low (e.g. micromolar) concentrations of proteins and can be carried out under physiological conditions.

[0520] Exemplary sequences are as follows:

| NAME | SEQUENCE OF LIGAND-DEPENDENT INTEIN |
|---|---|
| 2-4 INTEIN: | CLAEGTRIFDPVTGTTHRIEDVVDGRKPIHVVAAAKDGTLLARPVVSWFDQGTRDVIGLRIAGGAIV |
| | WATPDHKVLTEYGWRAAGELRKGDRVAGPGGSGNSLALSLTADQMVSALLDAEPPILYSEYDPTSPF |
| | SEASMMGLLTNLADRELVHMINWAKRVPGFVDLTLHDQAHLLECAWLEILMIGLVWRSMEHPGKLLF |
| | APNLLLDRNQGKCVEGMVEIFDMLLATSSRFRMMNLQGEEFVCLKSIILLNSGVYTFLSSTLKSLEE |
| | KDHIHRALDKITDTLIHLMAKAGLTLQQQHQRLAQLLLILSHIRHMSNKGMEHLYSMKYKNVVPLYD |
| | LLLEMLDAHRLHAGGSGASRVQAFADALDDKFLHDMLAEELRYSVIREVLPTRRARTFDLEVEELHT |
| | LVAEGVVVHNC (SEQ ID NO: 305) |
| 3-2 INTEIN | CLAEGTRIFDPVTGTTHRIEDVVDGRKPIHVVAVAKDGTLLARPVVSWFDQGTRDVIGLRIAGGAIV |
| | WATPDHKVLTEYGWRAAGELRKGDRVAGPGGSGNSLALSLTADQMVSALLDAEPPILYSEYDPTSPF |
| | SEASMMGLLTNLADRELVHMINWAKRVPGFVDLTLHDQAHLLECAWLEILMIGLVWRSMEHPGKLLF |
| | APNLLLDRNQGKCVEGMVEIFDMLLATSSRFRMMNLQGEEFVCLKSIILLNSGVYTFLSSTLKSLEE |
| | KDHIHRALDKITDTLIHLMAKAGLTLQQQHQRLAQLLLILSHIRHMSNKGMEHLYSMKYTNVVPLYD |
| | LLLEMLDAHRLHAGGSGASRVQAFADALDDKFLHDMLAEELRYSVIREVLPTRRARTFDLEVEELHT |
| | LVAEGVVVHNC (SEQ ID NO: 306) |
| 30R3-1 INTEIN | CLAEGTRIFDPVTGTTHRIEDVVDGRKPIHVVAAAKDGTLLARPVVSWFDQGTRDVIGLRIAGGATV |
| | WATPDHKVLTEYGWRAAGELRKGDRVAGPGGSGNSLALSLTADQMVSALLDAEPPIPYSEYDPTSPF |
| | SEASMMGLLTNLADRELVHMINWAKRVPGFVDLTLHDQAHLLECAWLEILMIGLVWRSMEHPGKLLF |
| | APNLLLDRNQGKCVEGMVEIFDMLLATSSRFRMMNLQGEEFVCLKSIILLNSGVYTFLSSTLKSLEE |
| | KDHIHRALDKITDTLIHLMAKAGLTLQQQHQRLAQLLLILSHIRHMSNKGMEHLYSMKYKNVVPLYD |
| | LLLEMLDAHRLHAGGSGASRVQAFADALDDKFLHDMLAEGLRYSVIREVLPTRRARTFDLEVEELHT |
| | LVAEGVVVHNC (SEQ ID NO: 307) |
| 30R3-2 INTEIN | CLAEGTRIFDPVTGTTHRIEDVVDGRKPIHVVAAAKDGTLLARPVVSWFDQGTRDVIGLRIAGGATV |
| | WATPDHKVLTEYGWRAAGELRKGDRVAGPGGSGNSLALSLTADQMVSALLDAEPPILYSEYDPTSPF |
| | SEASMMGLLTNLADRELVHMINWAKRVPGFVDLTLHDQAHLLECAWLEILMIGLVWRSMEHPGKLLF |
| | APNLLLDRNQGKCVEGMVEIFDMLLATSSRFRMMNLQGEEFVCLKSIILLNSGVYTFLSSTLKSLEE |
| | KDHIHRALDKITDTLIHLMAKAGLTLQQQHQRLAQLLLILSHIRHMSNKGMEHLYSMKYKNVVPLYD |
| | LLLEMLDAHRLHAGGSGASRVQAFADALDDKFLHDMLAEELRYSVIREVLPTRRARTFDLEVEELHT |
| | LVAEGVVVHNC (SEQ ID NO: 308) |
| 30R3-3 INTEIN | CLAEGTRIFDPVTGTTHRIEDVVDGRKPIHVVAAAKDGTLLARPVVSWFDQGTRDVIGLRIAGGATV |
| | WATPDHKVLTEYGWRAAGELRKGDRVAGPGGSGNSLALSLTADQMVSALLDAEPPIPYSEYDPTSPF |
| | SEASMMGLLTNLADRELVHMINWAKRVPGFVDLTLHDQAHLLECAWLEILMIGLVWRSMEHPGKLLF |
| | APNLLLDRNQGKCVEGMVEIFDMLLATSSRFRMMNLQGEEFVCLKSIILLNSGVYTFLSSTLKSLEE |
| | KDHIHRALDKITDTLIHLMAKAGLTLQQQHQRLAQLLLILSHIRHMSNKGMEHLYSMKYKNVVPLYD |
| | LLLEMLDAHRLHAGGSGASRVQAFADALDDKFLHDMLAEELRYSVIREVLPTRRARTFDLEVEELHT |
| | LVAEGVVVHNC (SEQ ID NO: 309) |
| 37R3-1 INTEIN | CLAEGTRIFDPVTGTTHRIEDVVDGRKPIHVVAAAKDGTLLARPVVSWFDQGTRDVIGLRIAGGATV |
| | WATPDHKVLTEYGWRAAGELRKGDRVAGPGGSGNSLALSLTADQMVSALLDAEPPILYSEYNPTSPF |
| | SEASMMGLLTNLADRELVHMINWAKRVPGFVDLTLHDQAHLLERAWLEILMIGLVWRSMEHPGKLLF |
| | APNLLLDRNQGKCVEGMVEIFDMLLATSSRFRMMNLQGEEFVCLKSIILLNSGVYTFLSSTLKSLEE |
| | KDHIHRALDKITDTLIHLMAKAGLTLQQQHQRLAQLLLILSHIRHMSNKGMEHLYSMKYKNVVPLYD |
| | LLLEMLDAHRLHAGGSGASRVQAFADALDDKFLHDMLAEGLRYSVIREVLPTRRARTFDLEVEELHT |
| | LVAEGVVVHNC ((SEQ ID NO: 310) |
| 37R3-2 INTEIN | CLAEGTRIFDPVTGTTHRIEDVVDGRKPIHVVAAAKDGTLLARPVVSWFDQGTRDVIGLRIAGGAIV |
| | WATPDHKVLTEYGWRAAGELRKGDRVAGPGGSGNSLALSLTADQMVSALLDAEPPILYSEYDPTSPF |
| | SEASMMGLLTNLADRELVHMINWAKRVPGFVDLTLHDQAHLLERAWLEILMIGLVWRSMEHPGKLLF |
| | APNLLLDRNQGKCVEGMVEIFDMLLATSSRFRMMNLQGEEFVCLKSIILLNSGVYTFLSSTLKSLEE |
| | KDHIHRALDKITDTLIHLMAKAGLTLQQQHQRLAQLLLILSHIRHMSNKGMEHLYSMKYKNVVPLYD |
| | LLLEMLDAHRLHAGGSGASRVQAFADALDDKFLHDMLAEGLRYSVIREVLPTRRARTFDLEVEELHT |
| | LVAEGVVVHNC (SEQ ID NO: 311) |
| 37R3-3 INTEIN | CLAEGTRIFDPVTGTTHRIEDVVDGRKPIHVVAVAKDGTLLARPVVSWFDQGTRDVIGLRIAGGATV |
| | WATPDHKVLTEYGWRAAGELRKGDRVAGPGGSGNSLALSLTADQMVSALLDAEPPILYSEYDPTSPF |
| | SEASMMGLLTNLADRELVHMINWAKRVPGFVDLTLHDQAHLLERAWLEILMIGLVWRSMEHPGKLLF |
| | APNLLLDRNQGKCVEGMVEIFDMLLATSSRFRMMNLQGEEFVCLKSIILLNSGVYTFLSSTLKSLEE |
| | KDHIHRALDKITDTLIHLMAKAGLTLQQQHQRLAQLLLILSHIRHMSNKGMEHLYSMKYKNVVPLYD |
| | LLLEMLDAHRLHAGGSGASRVQAFADALDDKFLHDMLAEELRYSVIREVLPTRRARTFDLEVEELHT |
| | LVAEGVVVHNC (SEQ ID NO: 312) |

[0521] Although inteins are most frequently found as a contiguous domain, some exist in a naturally split form. In this case, the two fragments are expressed as separate polypeptides and must associate before splicing takes place, so-called protein trans-splicing.

[0522] An exemplary split intein is the Ssp DnaE intein, which comprises two subunits, namely, DnaE-N and DnaE-C. The two different subunits are encoded by separate genes, namely dnaE-n and dnaE-c, which encode the DnaE-N and DnaE-C subunits, respectively. DnaE is a naturally occurring split intein in Synechocytis sp. PCC6803 and is capable of directing trans-splicing of two separate proteins, each comprising a fusion with either DnaE-N or DnaE-C.

[0523] Additional naturally occurring or engineered split-intein sequences are known in the or can be made from whole-intein sequences described herein or those available in the art. Examples of split-intein sequences can be found in Stevens et al., “A promiscuous split intein with expanded protein engineering applications,” PNAS, 2017, Vol. 114: 8538-8543; Iwai et al., “Highly efficient protein trans-splicing by a naturally split DnaE intein from Nostc punctiforme, FEBS Lett, 580: 1853-1858, each of which are incorporated herein by reference. Additional split intein sequences can be found, for example, in WO 2013/045632, WO 2014/055782, WO 2016/069774, and EP2877490, the contents each of which are incorporated herein by reference.

[0524] In addition, protein splicing in trans has been described in vivo and in vitro (Shingledecker, et al., Gene 207:187 (1998), Southworth, et al., EMBO J. 17:918 (1998); Mills, et al., Proc. Natl. Acad. Sci. USA, 95:3543-3548 (1998); Lew, et al., J. Biol. Chem., 273:15887-15890 (1998); Wu, et al., Biochim. Biophys. Acta 35732:1 (1998b), Yamazaki, et al., J. Am. Chem. Soc. 120:5591 (1998), Evans, et al., J. Biol. Chem. 275:9091 (2000); Otomo, et al., Biochemistry 38:16040-16044 (1999); Otomo, et al., J. Biolmol. NMR 14:105-114 (1999); Scott, et al., Proc. Natl. Acad. Sci. USA 96:13638-13643 (1999)) and provides the opportunity to express a protein as to two inactive fragments that subsequently undergo ligation to form a functional product.

### ABEs and CBEs

[0525] The present disclosure also provides base editor fusion proteins comprising (a) an improved Cas9 domain having modified PAM specificity and/or an expanded editing window, and (b) a deaminase, e.g., an adenosine deaminase or a cytidine deaminase.

[0526] In various embodiments, the Cas9 domains and the deaminase domains may be joined by a linker.

[0527] In various embodiments, the fusion proteins may have, but are not limited to, the following structures: N-terminus-[Cas9 domain]-[linker]-[deaminase domain]-C-terminus; N-terminus-[deaminase domain]-[linker]-[Cas9 domain].

[0528] In various embodiments, the ABE or CBE fusions have the following amino acid sequences:

VRQR-ABEmax (SEQ ID NO: 66)
(SEQ ID NO: 66)
MKRTADGSEFESPKKKRKVSEVEFSHEYWMRHALTLAKRAWDEREVPVGAV
LVHNNRVIGEGWNRPIGRHDPTAHAEIMALRQGGLVMQNYRLIDATLYVTL
EPCVMCAGAMIHSRIGRVVFGARDAKTGAAGSLMDVLHHPGMNHRVEITEG
ILADECAALLSDFFRMRRQEIKAQKKAQSSTDSGGSSGGSSGSETPGTSES
ATPESSGGSSGGSSEVEFSHEYWMRHALTLAKRARDEREVPVGAVLVLNNR
VIGEGWNRAIGLHDPTAHAEIMALRQGGLVMQNYRLIDATLYVTFEPCVMC
AGAMIHSRIGRVVFGVRNAKTGAAGSLMDVLHYPGMNHRVEITEGILADEC
AALLCYFFRMPRQVFNAQKKAQSSTDSGGSSGGSSGSETPGTSESATPESS
GGSSGGSDKKYSIGLAIGTNSVGWAVITDEYKVPSKKFKVLGNTDRHSIKK
NLIGALLFDSGETAEATRLKRTARRRYTRRKNRICYLQEIFSNEMAKVDDS
FFHRLEESFLVEEDKKHERHPIFGNIVDEVAYHEKYPTIYHLRKKLVDSTD
KADLRLIYLALAHMIKFRGHFLIEGDLNPDNSDVDKLFIQLVQTYNQLFEE
NPINASGVDAKAILSARLSKSRRLENLIAQLPGEKKNGLFGNLIALSLGLT
PNFKSNFDLAEDAKLQLSKDTYDDDLDNLLAQIGDQYADLFLAAKNLSDAI
LLSDILRVNTEITKAPLSASMIKRYDEHHQDLTLLKALVRQQLPEKYKEIF
FDQSKNGYAGYIDGGASQEEFYKFIKPILEKMDGTEELLVKLNREDLLRKQ
RTFDNGSIPHQIHLGELHAILRRQEDFYPFLKDNREKIEKILTFRIPYYVG
PLARGNSRFAWMTRKSEETITPWNFEEVVDKGASAQSFIERMTNFDKNLPN
EKVLPKHSLLYEYFTVYNELTKVKYVTEGMRKPAFLSGEQKKAIVDLLFKT
NRKVTVKQLKEDYFKKIECFDSVEISGVEDRFNASLGTYHDLLKIIKDKDF
LDNEENEDILEDIVLTLTLFEDREMIEERLKTYAHLFDDKVMKQLKRRRYT
GWGRLSRKLINGIRDKQSGKTILDFLKSDGFANRNFMQLIHDDSLTFKEDI
QKAQVSGQGDSLHEHIANLAGSPAIKKGILQTVKVVDELVKVMGRHKPENI
VIEMARENQTTQKGQKNSRERMKRIEEGIKELGSQILKEHPVENTQLQNEK
LYLYYLQNGRDMYVDQELDINRLSDYDVDHIVPQSFLKDDSIDNKVLTRSD
KNRGKSDNVPSEEVVKKMKNYWRQLLNAKLITQRKFDNLTKAERGGLSELD
KAGFIKRQLVETRQITKHVAQILDSRMNTKYDENDKLIREVKVITLKSKLV
SDFRKDFQFYKVREINNYHHAHDAYLNAVVGTALIKKYPKLESEFVYGDYK
VYDVRKMIAKSEQEIGKATAKYFFYSNIMNFFKTEITLANGEIRKRPLIET
NGETGEIVWDKGRDFATVRKVLSMPQVNIVKKTEVQTGGFSKESILPKRNS
DKLIARKKDWDPKKYGGFVSPTVAYSVLVVAKVEKGKSKKLKSVKELLGIT
IMERSSFEKNPIDFLEAKGYKEVKKDLIIKLPKYSLFELENGRKRMLASAR
ELQKGNELALPSKYVNFLYLASHYEKLKGSPEDNEQKQLFVEQHKHYLDEI
IEQISEFSKRVILADANLDKVLSAYNKHRDKPIREQAENIIHLFTLTNLGA
PAAFKYFDTTIDRKQYRSTKEVLDATLIHQSITGLYETRIDLSQLGGDSGG
SKRTADGSEFEPKKKRKV.

[0529] VRQR-ABEmax may also be referred to as “ABEmax (7.10)” and has the following structure: NLS ecTadA_{(wild-type)}-(SGGS)₂-XTEN-(SGGS)₂-ecTadA7.10_{(w23R_H36L_P48A_R51L_L84F_A106V_D108N_H123Y_S146C_D147Y_R152P_E155V_I156F_K157N)}-(SGGS)₂-XTEN-(SGGS)₂_nCas9_VRQR_SGGS_NLS. These structural features of VRQR-ABEmax may be shown in SEQ ID NO: 66, as follows:

(SEQ ID NO: 66)
MKRTADGSEFESPKKKRKVSEVEFSHEYWMRHALTLAKRAWDEREVPVGAVLVH
NNRVIGEGWNRPIGRHDPTAHAEIMALRQGGLVMQNYRLIDATLYVTLEPCVM
CAGAMIHSRIGRVVFGARDAKTGAAGSLMDVLHHPGMNHRVEITEGILADECA
ALLSDFFRMRRQEIKAQKKAQSSTDSGGSSGGSSGSETPGTSESATPESSGGSSGGSS
EVEFSHEYWMRHALTLAKRARDEREVPVGAVLVLNNRVIGEGWNRAIGLHDPT
AHAEIMALRQGGLVMQNYRLIDATLYVTFEPCVMCAGAMIHSRIGRVVFGVRN
AKTGAAGSLMDVLHYPGMNHRVEITEGILADECAALLCYFFRMPRQVFNAQKK
AQSSTDSGGSSGGSSGSETPGTSESATPESSGGSSGGSDKKYSIGLAIGTNSVGWAVIT
DEYKVPSKKFKVLGNTDRHSIKKNLIGALLFDSGETAEATRLKRTARRRYTRRKNRI
CYLQEIFSNEMAKVDDSFFHRLEESFLVEEDKKHERHPIFGNIVDEVAYHEKYPTIYH
LRKKLVDSTDKADLRLIYLALAHMIKFRGHFLIEGDLNPDNSDVDKLFIQLVQTYNQ
LFEENPINASGVDAKAILSARLSKSRRLENLIAQLPGEKKNGLFGNLIALSLGLTPNFK
SNFDLAEDAKLQLSKDTYDDDLDNLLAQIGDQYADLFLAAKNLSDAILLSDILRVNT
EITKAPLSASMIKRYDEHHQDLTLLKALVRQQLPEKYKEIFFDQSKNGYAGYIDGGA
SQEEFYKFIKPILEKMDGTEELLVKLNREDLLRKQRTFDNGSIPHQIHLGELHAILRRQ
EDFYPFLKDNREKIEKILTFRIPYYVGPLARGNSRFAWMTRKSEETITPWNFEEVVDK
GASAQSFIERMTNFDKNLPNEKVLPKHSLLYEYFTVYNELTKVKYVTEGMRKPAFLS
GEQKKAIVDLLFKTNRKVTVKQLKEDYFKKIECFDSVETSGVEDRFNASLGTYHDLL
KIIKDKDFLDNEENEDILEDIVLTLTLFEDREMIEERLKTYAHLFDDKVMKQLKRRRY
TGWGRLSRKLINGIRDKQSGKTILDFLKSDGFANRNFMQLIHDDSLTFKEDIQKAQVS
GQGDSLHEHIANLAGSPAIKKGILQTVKVVDELVKVMGRHKPENIVIEMARENQTTQ
KGQKNSRERMKRIEEGIKELGSQILKEHPVENTQLQNEKLYLYYLQNGRDMYVDQE
LDINRLSDYDVDHIVPQSFLKDDSIDNKVLTRSDKNRGKSDNVPSEEVVKKMKNYW
RQLLNAKLITQRKFDNLTKAERGGLSELDKAGFIKRQLVETRQITKHVAQILDSRMN
TKYDENDKLIREVKVITLKSKLVSDFRKDFQFYKVREINNYHHAHDAYLNAVVGTA
LIKKYPKLESEFVYGDYKVYDVRKMIAKSEQEIGKATAKYFFYSNIMNFFKTEITLAN
GEIRKRPLIETNGETGEIVWDKGRDFATVRKVLSMPQVNIVKKTEVQTGGFSKESILP
KRNSDKLIARKKDWDPKKYGGFVSPTVAYSVLVVAKVEKGKSKKLKSVKELLGITI
MERSSFEKNPIDFLEAKGYKEVKKDLIIKLPKYSLFELENGRKRMLASARELQKGNEL
ALPSKYVNFLYLASHYEKLKGSPEDNEQKQLFVEQHKHYLDEIIEQISEFSKRVILAD
ANLDKVLSAYNKHRDKPIREQAENIIHLFTLTNLGAPAAFKYFDTTIDRKQYRSTKEV
LDATLIHQSITGLYETRIDLSQLGGDSGGSKRTADGSEFEPKKKRKV.
xABEmax (SEQ ID NO: 67)
(SEQ ID NO: 67)
MKRTADGSEFESPKKKRKVSEVEFSHEYWMRHALTLAKRAWDEREVPVGA
VLVHNNRVIGEGWNRPIGRHDPTAHAEIMALRQGGLVMQNYRLIDATLYVTLEPCVM
CAGAMIHSRIGRVVFGARDAKTGAAGSLMDVLHHPGMNHRVEITEGILADECAALL
SDFFRMRRQEIKAQKKAQSSTDSGGSSGGSSGSETPGTSESATPESSGGSSGGSSEVEF
SHEYWMRHALTLAKRARDEREVPVGAVLVLNNRVIGEGWNRAIGLHDPTAHAEIMA
LRQGGLVMQNYRLIDATLYVTFEPCVMCAGAMIHSRIGRVVFGVRNAKTGAAGSLM
DVLHYPGMNHRVEITEGILADECAALLCYFFRMPRQVFNAQKKAQSSTDSGGSSGGS
SGSETPGTSESATPESSGGSSGGSDKKYSIGLAIGTNSVGWAVITDEYKVPSKKFKVLG
NTDRHSIKKNLIGALLFDSGETAEATRLKRTARRRYTRRKNRICYLQEIFSNEMAKVD
DSFFHRLEESFLVEEDKKHERHPIFGNIVDEVAYHEKYPTIYHLRKKLVDSTDKADLR
LIYLALAHMIKFRGHFLIEGDLNPDNSDVDKLFIQLVQTYNQLFEENPINTASGVDAKA
ILSARLSKSRRLENLIAQLPGEKKNGLFGNLIALSLGLTPNFKSNFDLAEDTKLQLSKD
TYDDDLDNLLAQIGDQYADLFLAAKNLSDAILLSDILRVNTEITKAPLSASMIKLYDE
HHQDLTLLKALVRQQLPEKYKEIFFDQSKNGYAGYIDGGASQEEFYKFIKPILEKMDG
TEELLVKLNREDLLRKQRTFDNGIIPHQIHLGELHAILRRQEDFYPFLKDNREKIEKILT
FRIPYYVGPLARGNSRFAWMTRKSEETITPWNFEKVVDKGASAQSFIERMTNFDKNL
PNEKVLPKHSLLYEYFTVYNELTKVKYVTEGMRKPAFLSGDQKKAIVDLLFKTNRKV
TVKQLKEDYFKKIECFDSVETSGVEDRFNASLGTYHDLLKIIKDKDFLDNEENEDILED
IVLTLTLFEDREMIEERLKTYAHLFDDKVMKQLKRRRYTGWGRLSRKLINGIRDKQS
GKTILDFLKSDGFANRNFIQLIHDDSLTFKEDIQKAQVSGQGDSLHEHIANLAGSPAIK
KGILQTVKVVDELVKVMGRHKPENIVIEMARENQTTQKGQKNSRERMKRIEEGIKEL
GSQILKEHPVENTQLQNEKLYLYYLQNGRDMYVDQELDINRLSDYDVDHIVPQSFLK
DDSIDNKVLTRSDKNRGKSDNVPSEEVVKKMKNYWRQLLNAKLITQRKFDNLTKAE
RGGLSELDKAGFIKRQLVETRQITKHVAQILDSRMNTKYDENDKLIREVKVITLKSKL
VSDFRKDFQFYKVREINNYHHAHDAYLNAVVGTALIKKYPKLESEFVYGDYKVYDV
RKMIAKSEQEIGKATAKYFFYSNIMNFFKTEITLANGEIRKRPLIETNGETGEIVWDKG
RDFATVRKVLSMPQVNIVKKTEVQTGGFSKESILPKRNSDKLIARKKDWDPKKYGGF
DSPTVAYSVLVVAKVEKGKSKKLKSVKELLGITIMERSSFEKNPIDFLEAKGYKEVKK
DLIIKLPKYSLFELENGRKRMLASAGVLQKGNELALPSKYVNFLYLASHYEKLKGSPE
DNEQKQLFVEQHKHYLDEIIEQISEFSKRVILADANLDKVLSAYNKHRDKPIREQAENI
IHLFTLTNLGAPAAFKYFDTTIDRKRYTSTKEVLDATLIHQSITGLYETRIDLSQLGGDS
GGSKRTADGSEFEPKKKRKV.
xABEmax (Met⁻) (SEQ ID NO: 68)
(SEQ ID NO: 68)
KRTADGSEFESPKKKRKVSEVEFSHEYWMRHALTLAKRAWDEREVPVGAVL
VHNNRVIGEGWNRPIGRHDPTAHAEIMALRQGGLVMQNYRLIDATLYVTLEPCVMC
AGAMIHSRIGRVVFGARDAKTGAAGSLMDVLHHPGMNHRVEITEGILADECAALLS
DFFRMRRQEIKAQKKAQSSTDSGGSSGGSSGSETPGTSESATPESSGGSSGGSSEVEFS
HEYWMRHALTLAKRARDEREVPVGAVLVLNNRVIGEGWNRAIGLHDPTAHAEIMAL
RQGGLVMQNYRLIDATLYVTFEPCVMCAGAMIHSRIGRVVFGVRNAKTGAAGSLMD
VLHYPGMNHRVEITEGILADECAALLCYFFRMPRQVFNAQKKAQSSTDSGGSSGGSS
GSETPGTSESATPESSGGSSGGSDKKYSIGLAIGTNSVGWAVITDEYKVPSKKFKVLGN
TDRHSIKKNLIGALLFDSGETAEATRLKRTARRRYTRRKNRICYLQEIFSNEMAKVDD
SFFHRLEESFLVEEDKKHERHPIFGNIVDEVAYHEKYPTIYHLRKKLVDSTDKADLRLI
YLALAHMIKFRGHFLIEGDLNPDNSDVDKLFIQLVQTYNQLFEENPINASGVDAKAIL
SARLSKSRRLENLIAQLPGEKKNGLFGNLIALSLGLTPNFKSNFDLAEDTKLQLSKDT
YDDDLDNLLAQIGDQYADLFLAAKNLSDAILLSDILRVNTEITKAPLSASMIKLYDEH
HQDLTLLKALVRQQLPEKYKEIFFDQSKNGYAGYIDGGASQEEFYKFIKPILEKMDGT
EELLVKLNREDLLRKQRTFDNGIIPHQIHLGELHAILRRQEDFYPFLKDNREKIEKILTF
RIPYYVGPLARGNSRFAWMTRKSEETITPWNFEKVVDKGASAQSFIERMTNFDKNLP
NEKVLPKHSLLYEYFTVYNELTKVKYVTEGMRKPAFLSGDQKKAIVDLLFKTNRKVT
VKQLKEDYFKKIECFDSVETSGVEDRFNASLGTYHDLLKIIKDKDFLDNEENEDILEDI
VLTLTLFEDREMIEERLKTYAHLFDDKVMKQLKRRRYTGWGRLSRKLINGIRDKQSG
KTILDFLKSDGFANRNFIQLIHDDSLTFKEDIQKAQVSGQGDSLHEHIANLAGSPAIKK
GILQTVKVVDELVKVMGRHKPENIVIEMARENQTTQKGQKNSRERMKRIEEGIKELG
SQILKEHPVENTQLQNEKLYLYYLQNGRDMYVDQELDINRLSDYDVDHIVPQSFLKD
DSIDNKVLTRSDKNRGKSDNVPSEEVVKKMKNYWRQLLNAKLITQRKFDNLTKAER
GGLSELDKAGFIKRQLVETRQITKHVAQILDSRMNTKYDENDKLIREVKVITLKSKLV
SDFRKDFQFYKVREINNYHHAHDAYLNAVVGTALIKKYPKLESEFVYGDYKVYDVR
KMIAKSEQEIGKATAKYFFYSNIMNFFKTEITLANGEIRKRPLIETNGETGEIVWDKGR
DFATVRKVLSMPQVNIVKKTEVQTGGFSKESILPKRNSDKLIARKKDWDPKKYGGFD
SPTVAYSVLVVAKVEKGKSKKLKSVKELLGITIMERSSFEKNPIDFLEAKGYKEVKKD
LIIKLPKYSLFELENGRKRMLASAGVLQKGNELALPSKYVNFLYLASHYEKLKGSPED
NEQKQLFVEQHKHYLDEIIEQISEFSKRVILADANLDKVLSAYNKHRDKPIREQAENII
HLFTLTNLGAPAAFKYFDTTIDRKRYTSTKEVLDATLIHQSITGLYETRIDLSQLGGDS
GGSKRTADGSEFEPKKKRKV.

[0530] The xABEmax and xABEmax (Mer) are identical amino acid sequences except the xABEmax (Mer) removes the N-terminal methionine from xABEmax.

VRER-ABEmax (SEQ ID NO: 69)
(SEQ ID NO: 69)
MKRTADGSEFESPKKKRKVSEVEFSHEYWMRHALTLAKRAWDEREVPVGA
VLVHNNRVIGEGWNRPIGRHDPTAHAEIMALRQGGLVMQNYRLIDATLYVTLEPCVM
CAGAMIHSRIGRVVFGARDAKTGAAGSLMDVLHHPGMNHRVEITEGILADECAALL
SDFFRMRRQEIKAQKKAQSSTDSGGSSGGSSGSETPGTSESATPESSGGSSGGSSEVEF
SHEYWMRHALTLAKRARDEREVPVGAVLVLNNRVIGEGWNRAIGLHDPTAHAEIMA
LRQGGLVMQNYRLIDATLYVTFEPCVMCAGAMIHSRIGRVVFGVRNAKTGAAGSLM
DVLHYPGMNHRVEITEGILADECAALLCYFFRMPRQVFNAQKKAQSSTDSGGSSGGS
SGSETPGTSESATPESSGGSSGGSDKKYSIGLAIGTNSVGWAVITDEYKVPSKKFKVLG
NTDRHSIKKNLIGALLFDSGETAEATRLKRTARRRYTRRKNRICYLQEIFSNEMAKVD
DSFFHRLEESFLVEEDKKHERHPIFGNIVDEVAYHEKYPTIYHLRKKLVDSTDKADLR
LIYLALAHMIKFRGHFLIEGDLNPDNSDVDKLFIQLVQTYNQLFEENPINASGVDAKA
ILSARLSKSRRLENLIAQLPGEKKNGLFGNLIALSLGLTPNFKSNFDLAEDAKLQLSKD
TYDDDLDNLLAQIGDQYADLFLAAKNLSDAILLSDILRVNTEITKAPLSASMIKRYDE
HHQDLTLLKALVRQQLPEKYKEIFFDQSKNGYAGYIDGGASQEEFYKFIKPILEKMDG
TEELLVKLNREDLLRKQRTFDNGSIPHQIHLGELHAILRRQEDFYPFLKDNREKIEKILT
FRIPYYVGPLARGNSRFAWMTRKSEETITPWNFEEVVDKGASAQSFIERMTNFDKNL
PNEKVLPKHSLLYEYFTVYNELTKVKYVTEGMRKPAFLSGEQKKAIVDLLFKTNRKV
TVKQLKEDYFKKIECFDSVETSGVEDRFNASLGTYHDLLKIIKDKDFLDNEENEDILED
IVLTLTLFEDREMIEERLKTYAHLFDDKVMKQLKRRRYTGWGRLSRKLINGIRDKQS
GKTILDFLKSDGFANRNFMQLIHDDSLTFKEDIQKAQVSGQGDSLHEHIANLAGSPAI
KKGILQTVKVVDELVKVMGRHKPENIVIEMARENQTTQKGQKNSRERMKRIEEGIKE
LGSQILKEHPVENTQLQNEKLYLYYLQNGRDMYVDQELDINRLSDYDVDHIVPQSFL
KDDSIDNKVLTRSDKNRGKSDNVPSEEVVKKMKNYWRQLLNAKLITQRKFDNLTKA
ERGGLSELDKAGFIKRQLVETRQITKHVAQILDSRMNTKYDENDKLIREVKVITLKSK
LVSDFRKDFQFYKVREINNYHHAHDAYLNAVVGTALIKKYPKLESEFVYGDYKVYD
VRKMIAKSEQEIGKATAKYFFYSNIMNFFKTEITLANGEIRKRPLIETNGETGEIVWDK
GRDFATVRKVLSMPQVNIVKKTEVQTGGFSKESILPKRNSDKLIARKKDWDPKKYGG
FVSPTVAYSVLVVAKVEKGKSKKLKSVKELLGITIMERSSFEKNPIDFLEAKGYKEVK
KDLIIKLPKYSLFELENGRKRMLASARELQKGNELALPSKYVNFLYLASHYEKLKGSP
EDNEQKQLFVEQHKHYLDEIIEQISEFSKRVILADANLDKVLSAYNKHRDKPIREQAE
NIIHLFTLTNLGAPAAFKYFDTTIDRKEYRSTKEVLDATLIHQSITGLYETRIDLSQLGG
DSGGSKRTADGSEFEPKKKRKV.
SaABEmax (SEQ ID NO. 70)
(SEQ ID NO: 70)
MKRTADGSEFESPKKKRKVSEVEFSHEYWMRHALTLAKRAWDEREVPVGA
VLVHNNRVIGEGWNRPIGRHDPTAHAEIMALRQGGLVMQNYRLIDATLYVTLEPCVM
CAGAMIHSRIGRVVFGARDAKTGAAGSLMDVLHHPGMNHRVEITEGILADECAALL
SDFFRMRRQEIKAQKKAQSSTDSGGSSGGSSGSETPGTSESATPESSGGSSGGSSEVEF
SHEYWMRHALTLAKRARDEREVPVGAVLVLNNRVIGEGWNRAIGLHDPTAHAEIMA
LRQGGLVMQNYRLIDATLYVTFEPCVMCAGAMIHSRIGRVVFGVRNAKTGAAGSLM
DVLHYPGMNHRVEITEGILADECAALLCYFFRMPRQVFNAQKKAQSSTDSGGSSGGS
SGSETPGTSESATPESSGGSSGGSGKRNYILGLAIGITSVGYGIIDYETRDVIDAGVRLF
KEANVENNEGRRSKRGARRLKRRRRHRIQRVKKLLFDYNLLTDHSELSGINPYEARV
KGLSQKLSEEEFSAALLHLAKRRGVHNVNEVEEDTGNELSTKEQISRNSKALEEKYV
AELQLERLKKDGEVRGSINTRFKTSDYVKEAKQLLKVQKAYHQLDQSFIDTYIDLLET
RRTYYEGPGEGSPFGWKDIKEWYEMLMGHCTYFPEELRSVKYAYNADLYNALNDL
NNLVITRDENEKLEYYEKFQIIENVFKQKKKPTLKQIAKEILVNEEDIKGYRVTSTGKP
EFTNLKVYHDIKDITARKEIIENAELLDQIAKILTIYQSSEDIQEELTNLNSELTQEEIEQI
SNLKGYTGTHNLSLKAINLILDELWHTNDNQIAIFNRLKLVPKKVDLSQQKEIPTTLV
DDFILSPVVKRSFIQSIKVINAIIKKYGLPNDIIIELAREKNSKDAQKMINEMQKRNRQT
NERIEEIIRTTGKENAKYLIEKIKLHDMQEGKCLYSLEMPLEDLLNNPFNYEVDHIIPR
SVSFDNSFNNKVLVKQEENSKKGNRTPFQYLSSSDSKISYETFKKHILNLAKGKGRIS
KTKKEYLLEERDINRFSVQKDFINRNLVDTRYATRGLMNLLRSYFRVNNLDVKVKSIN
GGFTSFLRRKWKFKKERNKGYKHHAEDALIIANADFIFKEWKKLDKAKKVMENQM
FEEKQAESMPEIETEQEYKEIFITPHQIKHIKDFKDYKYSHRVDKKPNRELINDTLYST
RKDDKGNTLIVNNLNGLYDKDNDKLKKLINKSPEKLzMYHHDPQTYQKLKLIMEQY
GDEKNPLYKYYEETGNYLTKYSKKDNGPVIKKIKYYGNKLNAHLDITDDYPNSRNK
VVKLSLKPYRFDVYLDNGVYKFVTVKNLDVIKKENYYEVNSKCYEEAKKLKKISNQ
AEFIASFYNNDLIKINGELYRVIGVNNDLLNRIEVNMIDITYREYLENMNDKRPPRIIKT
IASKTQSIKKYSTDILGNLYEVKSKKHPQIIKKGSGGSKRTADGSEFEPKKKRKV.
SaKKH-ABEmax (SEQ ID NO: 71)
(SEQ ID NO: 71)
MKRTADGSEFESPKKKRKVSEVEFSHEYWMRHALTLAKRAWDEREVPVGA
VLVHNNRVIGEGWNRPIGRHDPTAHAEIMALRQGGLVMQNYRLIDATLYVTLEPCVM
CAGAMIHSRIGRVVFGARDAKTGAAGSLMDVLHHPGMNHRVEITEGILADECAALL
SDFFRMRRQEIKAQKKAQSSTDSGGSSGGSSGSETPGTSESATPESSGGSSGGSSEVEF
SHEYWMRHALTLAKRARDEREVPVGAVLVLNNRVIGEGWNRAIGLHDPTAHAEIMA
LRQGGLVMQNYRLIDATLYVTFEPCVMCAGAMIHSRIGRVVFGVRNAKTGAAGSLM
DVLHYPGMNHRVEITEGILADECAALLCYFFRMPRQVFNAQKKAQSSTDSGGSSGGS
SGSETPGTSESATPESSGGSSGGSGKRNYILGLAIGITSVGYGIIDYETRDVIDAGVRLF
KEANVENNEGRRSKRGARRLKRRRRHRIQRVKKLLFDYNLLTDHSELSGINPYEARV
KGLSQKLSEEEFSAALLHLAKRRGVHNVNEVEEDTGNELSTKEQISRNSKALEEKYV
AELQLERLKKDGEVRGSINTRFKTSDYVKEAKQLLKVQKAYHQLDQSFIDTYIDLLET
RRTYYEGPGEGSPFGWKDIKEWYEMLMGHCTYFPEELRSVKYAYNADLYNALNDL
NNLVITRDENEKLEYYEKFQIIENVFKQKKKPTLKQIAKEILVNEEDIKGYRVTSTGKP
EFTNLKVYHDIKDITARKEIIENAELLDQIAKILTIYQSSEDIQEELTNLNSELTQEEIEQI
SNLKGYTGTHNLSLKAINLILDELWHTNDNQIAIFNRLKLVPKKVDLSQQKEIPTTLV
DDFILSPVVKRSFIQSIKVINAIIKKYGLPNDIIIELAREKNSKDAQKMINEMQKRNRQT
NERIEEIIRTTGKENAKYLIEKIKLHDMQEGKCLYSLEMPLEDLLNNPFNYEVDHIIPR
SVSFDNSFNNKVLVKQEENSKKGNRTPFQYLSSSDSKISYETFKKHILNLAKGKGRIS
KTKKEYLLEERDINRFSVQKDFINRNLVDTRYATRGLMNLLRSYFRVNNLDVKVKSIN
GGFTSFLRRKWKFKKERNKGYKHHAEDALIIANADFIFKEWKKLDKAKKVMENQM
FEEKQAESMPEIETEQEYKEIFITPHQIKHIKDFKDYKYSHRVDKKPNRKLINDTLYST
RKDDKGNTLIVNNLNGLYDKDNDKLKKLINKSPEKLLMYHHDPQTYQKLKLIMEQY
GDEKNPLYKYYEETGNYLTKYSKKDNGPVIKKIKYYGNKLNAHLDITDDYPNSRNK
VVKLSLKPYRFDVYLDNGVYKFVTVKNLDVIKKENYYEVNSKCYEEAKKLKKISNQ
AEFIASFYKNDLIKINGELYRVIGVNNDLLNRIEVNMIDITYREYLENMNDKRPPHIIKT
IASKTQSIKKYSTDILGNLYEVKSKKHPQIIKKGSGGSKRTADGSEFEPKKKRKV.
CP1012-CBEmax (SEQ ID NO: 72)
(SEQ ID NO: 72)
TCLLYEINWGGRHSIWRHTSQNTNKHVEVNFIEKFTTERYFCPNTRCSITWFLSWSPC
GECSRAITEFLSRYPHVTLFIYIARLYHHADPRNRQGLRDLISSGVTIQIMTEQESGYC
WRNFVNYSPSNEAHWPRYPHLWVRLYVLELYCIILGLPPCLNILRRKQPQLTFFTIALQ
SCHYQRLPPHILWATGLKSGGSSGGSSGSETPGTSESATPESSGGSSGGSDYKVYDVR
KMIAKSEQEIGKATAKYFFYSNIMNFFKTEITLANGEIRKRPLIETNGETGEIVWDKGR
DFATVRKVLSMPQVNIVKKTEVQTGGFSKESILPKRNSDKLIARKKDWDPKKYGGFD
SPTVAYSVLVVAKVEKGKSKKLKSVKELLGITIMERSSFEKNPIDFLEAKGYKEVKKD
LIIKLPKYSLFELENGRKRMLASAGELQKGNELALPSKYVNFLYLASHYEKLKGSPED
NEQKQLFVEQHKHYLDEIIEQISEFSKRVILADANLDKVLSAYNKHRDKPIREQAENII
HLFTLTNLGAPAAFKYFDTTIDRKRYTSTKEVLDATLIHQSITGLYETRIDLSQLGGDG
GSGGSGGSGGSGGSGGSGGDKKYSIGLAIGTNSVGWAVITDEYKVPSKKFKVLGNTD
RHSIKKNLIGALLFDSGETAEATRLKRTARRRYTRRKNRICYLQEIFSNEMAKVDDSFF
HRLEESFLVEEDKKHERHPIFGNIVDEVAYHEKYPTIYHLRKKLVDSTDKADLRLIYL
ALAHMIKFRGHFLIEGDLNPDNSDVDKLFIQLVQTYNQLFEENPINASGVDAKAILSA
RLSKSRRLENLIAQLPGEKKNGLFGNLIALSLGLTPNFKSNFDLAEDAKLQLSKDTYD
DDLDNLLAQIGDQYADLFLAAKNLSDAILLSDILRVNTEITKAPLSASMIKRYDEHHQ
DLTLLKALVRQQLPEKYKEIFFDQSKNGYAGYIDGGASQEEFYKFIKPILEKMDGTEE
LLVKLNREDLLRKQRTFDNGSIPHQIHLGELHAILRRQEDFYPFLKDNREKIEKILTFRI
PYYVGPLARGNSRFAWMTRKSEETITPWNFEEVVDKGASAQSFIERMTNFDKNLPNE
KVLPKHSLLYEYFTVYNELTKVKYVTEGMRKPAFLSGEQKKAIVDLLFKTNRKVTVK
QLKEDYFKKIECFDSVETSGVEDRFNASLGTYHDLLKIIKDKDFLDNEENEDILEDIVL
TLTLFEDREMIEERLKTYAHLFDDKVMKQLKRRRYTGWGRLSRKLINGIRDKQSGKT
ILDFLKSDGFANRNFMQLIHDDSLTFKEDIQKAQVSGQGDSLHEHIANLAGSPAIKKGI
LQTVKVVDELVKVMGRHKPENIVIEMARENQTTQKGQKNSRERMKRIEEGIKELGS
QILKEHPVENTQLQNEKLYLYYLQNGRDMYVDQELDINRLSDYDVDHIVPQSFLKDD
SIDNKVLTRSDKNRGKSDNVPSEEVVKKMKNYWRQLLNAKLITQRKFDNLTKAERG
GLSELDKAGFIKRQLVETRQITKHVAQILDSRMNTKYDENDKLIREVKVITLKSKLVS
DFRKDFQFYKVREINNYHHAHDAYLNAVVGTALIKKYPKLESEFVYGSGGSKRTADG
SEFEPKKKRKV.
CP1028-CBEmax (SEQ ID NO: 73)
(SEQ ID NO: 73)
MKRTADGSEFESPKKKRKVSSETGPVAVDPTLRRRIEPHEFEVFFDPRELRKE
TCLLYEINWGGRHSIWRHTSQNTNKHVEVNFIEKFTTERYFCPNTRCSITWFLSWSPC
GECSRAITEFLSRYPHVTLFIYIARLYHHADPRNRQGLRDLISSGVTIQIMTEQESGYC
WRNFVNYSPSNEAHWPRYPHLWVRLYVLELYCIILGLPPCLNILRRKQPQLTFFTIALQ
SCHYQRLPPHILWATGLKSGGSSGGSSGSETPGTSESATPESSGGSSGGSEIGKATAKYF
FYSNIMNFFKTEITLANGEIRKRPLIETNGETGEIVWDKGRDFATVRKVLSMPQVNIV
KKTEVQTGGFSKESILPKRNSDKLIARKKDWDPKKYGGFDSPTVAYSVLVVAKVEKG
KSKKLKSVKELLGITIMERSSFEKNPIDFLEAKGYKEVKKDLIIKLPKYSLFELENGRK
RMLASAGELQKGNELALPSKYVNFLYLASHYEKLKGSPEDNEQKQLFVEQHKHYLD
EIIEQISEFSKRVILADANLDKVLSAYNKHRDKPIREQAENIIHLFTLTNLGAPAAFKYF
DTTIDRKRYTSTKEVLDATLIHQSITGLYETRIDLSQLGGDGGSGGSGGSGGSGGSGGS
GGMDKKYSIGLAIGTNSVGWAVITDEYKVPSKKFKVLGNTDRHSIKKNLIGALLFDS
GETAEATRLKRTARRRYTRRKNRICYLQEIFSNEMAKVDDSFFHRLEESFLVEEDKKH
ERHPIFGNIVDEVAYHEKYPTIYHLRKKLVDSTDKADLRLIYLALAHMIKFRGHFLIEG
DLNPDNSDVDKLFIQLVQTYNQLFEENPINASGVDAKAILSARLSKSRRLENLIAQLP
GEKKNGLFGNLIALSLGLTPNFKSNFDLAEDAKLQLSKDTYDDDLDNLLAQIGDQYA
DLFLAAKNLSDAILLSDILRVNTEITKAPLSASMIKRYDEHHQDLTLLKALVRQQLPEK
YKEIFFDQSKNGYAGYIDGGASQEEFYKFIKPILEKMDGTEELLVKLNREDLLRKQRT
FDNGSIPHQIHLGELHAILRRQEDFYPFLKDNREKIEKILTFRIPYYVGPLARGNSRFAW
MTRKSEETITPWNFEEVVDKGASAQSFIERMTNFDKNLPNEKVLPKHSLLYEYFTVY
NELTKVKYVTEGMRKPAFLSGEQKKAIVDLLFKTNRKVTVKQLKEDYFKKIECFDSV
EISGVEDRFNASLGTYHDLLKIIKDKDFLDNEENEDILEDIVLTLTLFEDREMIEERLKT
YAHLFDDKVMKQLKRRRYTGWGRLSRKLINGIRDKQSGKTILDFLKSDGFANRNFM
QLIHDDSLTFKEDIQKAQVSGQGDSLHEHIANLAGSPAIKKGILQTVKVVDELVKVMG
RHKPENIVIEMARENQTTQKGQKNSRERMKRIEEGIKELGSQILKEHPVENTQLQNEK
LYLYYLQNGRDMYVDQELDINRLSDYDVDHIVPQSFLKDDSIDNKVLTRSDKNRGKS
DNVPSEEVVKKMKNYWRQLLNAKLITQRKFDNLTKAERGGLSELDKAGFIKRQLVE
TRQITKHVAQILDSRMNTKYDENDKLIREVKVITLKSKLVSDFRKDFQFYKVREINNY
HHAHDAYLNAVVGTALIKKYPKLESEFVYGDYKVYDVRKMIAKSEQSGGSKRTADG
SEFEPKKKRKV.
CP1041-CBEmax (SEQ ID NO: 74)
(SEQ ID NO: 74)
MKRTADGSEFESPKKKRKVSSETGPVAVDPTLRRRIEPHEFEVFFDPRELRKE
TCLLYEINWGGRHSIWRHTSQNTNKHVEVNFIEKFTTERYFCPNTRCSITWFLSWSPC
GECSRAITEFLSRYPHVTLFIYIARLYHHADPRNRQGLRDLISSGVTIQIMTEQESGYC
WRNFVNYSPSNEAHWPRYPHLWVRLYVLELYCIILGLPPCLNILRRKQPQLTFFTIALQ
SCHYQRLPPHILWATGLKSGGSSGGSSGSETPGTSESATPESSGGSSGGSNIMNFFKTEI
TLANGEIRKRPLIETNGETGEIVWDKGRDFATVRKVLSMPQVNIVKKTEVQTGGFSK
ESILPKRNSDKLIARKKDWDPKKYGGFDSPTVAYSVLVVAKVEKGKSKKLKSVKELL
GITIMERSSFEKNPIDFLEAKGYKEVKKDLIIKLPKYSLFELENGRKRMLASAGELQK
GNELALPSKYVNFLYLASHYEKLKGSPEDNEQKQLFVEQHKHYLDEIIEQISEFSKRVI
LADANLDKVLSAYNKHRDKPIREQAENIIHLFTLTNLGAPAAFKYFDTTIDRKRYTST
KEVLDATLIHQSITGLYETRIDLSQLGGDGGSGGSGGSGGSGGSGGSGGDKKYSIGLA
IGTNSVGWAVITDEYKVPSKKFKVLGNTDRHSIKKNLIGALLFDSGETAEATRLKRTA
RRRYTRRKNRICYLQEIFSNEMAKVDDSFFHRLEESFLVEEDKKHERHPIFGNIVDEVA
YHEKYPTIYHLRKKLVDSTDKADLRLIYLALAHMIKFRGHFLIEGDLNPDNSDVDKL
FIQLVQTYNQLFEENPINASGVDAKAILSARLSKSRRLENLIAQLPGEKKNGLFGNLIA
LSLGLTPNFKSNFDLAEDAKLQLSKDTYDDDLDNLLAQIGDQYADLFLAAKNLSDAI
LLSDILRVNTEITKAPLSASMIKRYDEHHQDLTLLKALVRQQLPEKYKEIFFDQSKNGY
AGYIDGGASQEEFYKFIKPILEKMDGTEELLVKLNREDLLRKQRTFDNGSIPHQIHLGE
LHAILRRQEDFYPFLKDNREKIEKILTFRIPYYVGPLARGNSRFAWMTRKSEETITPWN
FEEVVDKGASAQSFIERMTNFDKNLPNEKVLPKHSLLYEYFTVYNELTKVKYVTEGM
RKPAFLSGEQKKAIVDLLFKTNRKVTVKQLKEDYFKKIECFDSVETSGVEDRFNASLG
TYHDLLKIIKDKDFLDNEENEDILEDIVLTLTLFEDREMIEERLKTYAHLFDDKVMKQ
LKRRRYTGWGRLSRKLINGIRDKQSGKTILDFLKSDGFANRNFMQLIHDDSLTFKEDI
QKAQVSGQGDSLHEHIANLAGSPAIKKGILQTVKVVDELVKVMGRHKPENIVIEMAR
ENQTTQKGQKNSRERMKRIEEGIKELGSQILKEHPVENTQLQNEKLYLYYLQNGRDM
YVDQELDINRLSDYDVDHIVPQSFLKDDSIDNKVLTRSDKNRGKSDNVPSEEVVKKM
KNYWRQLLNAKLITQRKFDNLTKAERGGLSELDKAGFIKRQLVETRQITKHVAQILD
SRMNTKYDENDKLIREVKVITLKSKLVSDFRKDFQFYKVREINNYHHAHDAYLNAV
VGTALIKKYPKLESEFVYGDYKVYDVRKMIAKSEQEIGKATAKYFFYSSGGSKRTAD
GSEFEPKKKRKV.
CP1249-CBEmax (SEQ ID NO: 75)
(SEQ ID NO: 75)
MKRTADGSEFESPKKKRKVSSETGPVAVDPTLRRRIEPHEFEVFFDPRELRKE
TCLLYEINWGGRHSIWRHTSQNTNKHVEVNFIEKFTTERYFCPNTRCSITWFLSWSPC
GECSRAITEFLSRYPHVTLFIYIARLYHHADPRNRQGLRDLISSGVTIQIMTEQESGYC
WRNFVNYSPSNEAHWPRYPHLWVRLYVLELYCIILGLPPCLNILRRKQPQLTFFTIALQ
SCHYQRLPPHILWATGLKSGGSSGGSSGSETPGTSESATPESSGGSSGGSPEDNEQKQL
FVEQHKHYLDEIIEQISEFSKRVILADANLDKVLSAYNKHRDKPIREQAENIIHLFTLTN
LGAPAAFKYFDTTIDRKRYTSTKEVLDATLIHQSITGLYETRIDLSQLGGDGGSGGSGG
SGGSGGSGGSGGMDKKYSIGLAIGTNSVGWAVITDEYKVPSKKFKVLGNTDRHSIKK
NLIGALLFDSGETAEATRLKRTARRRYTRRKNRICYLQEIFSNEMAKVDDSFFHRLEES
FLVEEDKKHERHPIFGNIVDEVAYHEKYPTIYHLRKKLVDSTDKADLRLIYLALAHMI
KFRGHFLIEGDLNPDNSDVDKLFIQLVQTYNQLFEENPINASGVDAKAILSARLSKSR
RLENLIAQLPGEKKNGLFGNLIALSLGLTPNFKSNFDLAEDAKLQLSKDTYDDDLDN
LLAQIGDQYADLFLAAKNLSDAILLSDILRVNTEITKAPLSASMIKRYDEHHQDLTLLK
ALVRQQLPEKYKEIFFDQSKNGYAGYIDGGASQEEFYKFIKPILEKMDGTEELLVKLN
REDLLRKQRTFDNGSIPHQIHLGELHAILRRQEDFYPFLKDNREKIEKILTFRIPYYVGP
LARGNSRFAWMTRKSEETITPWNFEEVVDKGASAQSFIERMTNFDKNLPNEKVLPKH
SLLYEYFTVYNELTKVKYVTEGMRKPAFLSGEQKKAIVDLLFKTNRKVTVKQLKED
YFKKIECFDSVETSGVEDRFNASLGTYHDLLKIIKDKDFLDNEENEDILEDIVLTLTLFE
DREMIEERLKTYAHLFDDKVMKQLKRRRYTGWGRLSRKLINGIRDKQSGKTILDFLK
SDGFANRNFMQLIHDDSLTFKEDIQKAQVSGQGDSLHEHIANLAGSPAIKKGILQTVK
VVDELVKVMGRHKPENIVIEMARENQTTQKGQKNSRERMKRIEEGIKELGSQILKEH
PVENTQLQNEKLYLYYLQNGRDMYVDQELDINRLSDYDVDHIVPQSFLKDDSIDNK
VLTRSDKNRGKSDNVPSEEVVKKMKNYWRQLLNAKLITQRKFDNLTKAERGGLSEL
DKAGFIKRQLVETRQITKHVAQILDSRMNTKYDENDKLIREVKVITLKSKLVSDFRKD
FQFYKVREINNYHHAHDAYLNAVVGTALIKKYPKLESEFVYGDYKVYDVRKMIAKS
EQEIGKATAKYFFYSNIMNFFKTEITLANGEIRKRPLIETNGETGEIVWDKGRDFATVR
KVLSMPQVNIVKKTEVQTGGFSKESILPKRNSDKLIARKKDWDPKKYGGFDSPTVAY
SVLVVAKVEKGKSKKLKSVKELLGITIMERSSFEKNPIDFLEAKGYKEVKKDLIIKLPK
YSLFELENGRKRMLASAGELQKGNELALPSKYVNFLYLASHYEKLKGSSGGSKRTAD
GSEFEPKKKRKV.
CP1300-CBEmax (SEQ ID NO: 76)
(SEQ ID NO: 76)
MKRTADGSEFESPKKKRKVSSETGPVAVDPTLRRRIEPHEFEVFFDPRELRKE
TCLLYEINWGGRHSIWRHTSQNTNKHVEVNFIEKFTTERYFCPNTRCSITWFLSWSPC
GECSRAITEFLSRYPHVTLFIYIARLYHHADPRNRQGLRDLISSGVTIQIMTEQESGYC
WRNFVNYSPSNEAHWPRYPHLWVRLYVLELYCIILGLPPCLNILRRKQPQLTFFTIALQ
SCHYQRLPPHILWATGLKSGGSSGGSSGSETPGTSESATPESSGGSSGGSKPIREQAENI
IHLFTLTNLGAPAAFKYFDTTIDRKRYTSTKEVLDATLIHQSITGLYETRIDLSQLGGDG
GSGGSGGSGGSGGSGGSGGDKKYSIGLAIGTNSVGWAVITDEYKVPSKKFKVLGNTD
RHSIKKNLIGALLFDSGETAEATRLKRTARRRYTRRKNRICYLQEIFSNEMAKVDDSFF
HRLEESFLVEEDKKHERHPIFGNIVDEVAYHEKYPTIYHLRKKLVDSTDKADLRLIYL
ALAHMIKFRGHFLIEGDLNPDNSDVDKLFIQLVQTYNQLFEENPINASGVDAKAILSA
RLSKSRRLENLIAQLPGEKKNGLFGNLIALSLGLTPNFKSNFDLAEDAKLQLSKDTYD
DDLDNLLAQIGDQYADLFLAAKNLSDAILLSDILRVNTEITKAPLSASMIKRYDEHHQ
DLTLLKALVRQQLPEKYKEIFFDQSKNGYAGYIDGGASQEEFYKFIKPILEKMDGTEE
LLVKLNREDLLRKQRTFDNGSIPHQIHLGELHAILRRQEDFYPFLKDNREKIEKILTFRI
PYYVGPLARGNSRFAWMTRKSEETITPWNFEEVVDKGASAQSFIERMTNFDKNLPNE
KVLPKHSLLYEYFTVYNELTKVKYVTEGMRKPAFLSGEQKKAIVDLLFKTNRKVTVK
QLKEDYFKKIECFDSVETSGVEDRFNASLGTYHDLLKIIKDKDFLDNEENEDILEDIVL
TLTLFEDREMIEERLKTYAHLFDDKVMKQLKRRRYTGWGRLSRKLINGIRDKQSGKT
ILDFLKSDGFANRNFMQLIHDDSLTFKEDIQKAQVSGQGDSLHEHIANLAGSPAIKKGI
LQTVKVVDELVKVMGRHKPENIVIEMARENQTTQKGQKNSRERMKRIEEGIKELGS
QILKEHPVENTQLQNEKLYLYYLQNGRDMYVDQELDINRLSDYDVDHIVPQSFLKDD
SIDNKVLTRSDKNRGKSDNVPSEEVVKKMKNYWRQLLNAKLITQRKFDNLTKAERG
GLSELDKAGFIKRQLVETRQITKHVAQILDSRMNTKYDENDKLIREVKVITLKSKLVS
DFRKDFQFYKVREINNYHHAHDAYLNAVVGTALIKKYPKLESEFVYGDYKVYDVRK
MIAKSEQEIGKATAKYFFYSNIMNFFKTEITLANGEIRKRPLIETNGETGEIVWDKGRD
FATVRKVLSMPQVNIVKKTEVQTGGFSKESILPKRNSDKLIARKKDWDPKKYGGFDS
PTVAYSVLVVAKVEKGKSKKLKSVKELLGITIMERSSFEKNPIDFLEAKGYKEVKKDL
IIKLPKYSLFELENGRKRMLASAGELQKGNELALPSKYVNFLYLASHYEKLKGSPEDN
EQKQLFVEQHKHYLDEIIEQISEFSKRVILADANLDKVLSAYNKHRDSGGSKRTADGS
EFEPKKKRKV.
CP1012-ABEmax (SEQ ID NO: 77)
(SEQ ID NO: 77)
MKRTADGSEFESPKKKRKVSEVEFSHEYWMRHALTLAKRAWDEREVPVGA
VLVHNNRVIGEGWNRPIGRHDPTAHAEIMALRQGGLVMQNYRLIDATLYVTLEPCVM
CAGAMIHSRIGRVVFGARDAKTGAAGSLMDVLHHPGMNHRVEITEGILADECAALL
SDFFRMRRQEIKAQKKAQSSTDSGGSSGGSSGSETPGTSESATPESSGGSSGGSSEVEF
SHEYWMRHALTLAKRARDEREVPVGAVLVLNNRVIGEGWNRAIGLHDPTAHAEIMA
LRQGGLVMQNYRLIDATLYVTFEPCVMCAGAMIHSRIGRVVFGVRNAKTGAAGSLM
DVLHYPGzNHRVEITEGILADECAALLCYFFRMPRQVFNAQKKAQSSTDSGGSSGGS
SGSETPGTSESATPESSGGSSGGSDYKVYDVRKMIAKSEQEIGKATAKYFFYSNIMNFF
KTEITLANGEIRKRPLIETNGETGEIVWDKGRDFATVRKVLSMPQVNIVKKTEVQTGG
FSKESILPKRNSDKLIARKKDWDPKKYGGFDSPTVAYSVLVVAKVEKGKSKKLKSVK
ELLGITIMERSSFEKNPIDFLEAKGYKEVKKDLIIKLPKYSLFELENGRKRMLASAGEL
QKGNELALPSKYVNFLYLASHYEKLKGSPEDNEQKQLFVEQHKHYLDEIIEQISEFSK
RVILADANLDKVLSAYNKHRDKPIREQAENIIHLFTLTNLGAPAAFKYFDTTIDRKRYT
STKEVLDATLIHQSITGLYETRIDLSQLGGDGGSGGSGGSGGSGGSGGSGGDKKYSIG
LAIGTNSVGWAVITDEYKVPSKKFKVLGNTDRHSIKKNLIGALLFDSGETAEATRLKR
TARRRYTRRKNRICYLQEIFSNEMAKVDDSFFHRLEESFLVEEDKKHERHPIFGNIVDE
VAYHEKYPTIYHLRKKLVDSTDKADLRLIYLALAHMIKFRGHFLIEGDLNPDNSDVD
KLFIQLVQTYNQLFEENPINTASGVDAKAILSARLSKSRRLENLIAQLPGEKKNGLFGN
LIALSLGLTPNFKSNFDLAEDAKLQLSKDTYDDDLDNLLAQIGDQYADLFLAAKNLS
DAILLSDILRVNTEITKAPLSASMIKRYDEHHQDLTLLKALVRQQLPEKYKEIFFDQSK
NGYAGYIDGGASQEEFYKFIKPILEKMDGTEELLVKLNREDLLRKQRTFDNGSIPHQI
HLGELHAILRRQEDFYPFLKDNREKIEKILTFRIPYYVGPLARGNSRFAWMTRKSEETI
TPWNFEEVVDKGASAQSFIERMTNFDKNLPNEKVLPKHSLLYEYFTVYNELTKVKYV
TEGMRKPAFLSGEQKKAIVDLLFKTNRKVTVKQLKEDYFKKIECFDSVETSGVEDRF
NASLGTYHDLLKIIKDKDFLDNEENEDILEDIVLTLTLFEDREMIEERLKTYAHLFDDK
VMKQLKRRRYTGWGRLSRKLINGIRDKQSGKTILDFLKSDGFANRNFMQLIHDDSLT
FKEDIQKAQVSGQGDSLHEHIANLAGSPAIKKGILQTVKVVDELVKVMGRHKPENIVI
EMARENQTTQKGQKNSRERMKRIEEGIKELGSQILKEHPVENTQLQNEKLYLYYLQN
GRDMYVDQELDINRLSDYDVDHIVPQSFLKDDSIDNKVLTRSDKNRGKSDNVPSEEV
VKKMKNYWRQLLNAKLITQRKFDNLTKAERGGLSELDKAGFIKRQLVETRQITKHV
AQILDSRMNTKYDENDKLIREVKVITLKSKLVSDFRKDFQFYKVREINNYHHAHDAY
LNAVVGTALIKKYPKLESEFVYGSGGSKRTADGSEFEPKKKRKV.
CP1028-ABEmax (SEQ ID NO: 78)
(SEQ ID NO: 78)
MKRTADGSEFESPKKKRKVSEVEFSHEYWMRHALTLAKRAWDEREVPVGAVLVHN
NRVIGEGWNRPIGRHDPTAHAEIMALRQGGLVMQNYRLIDATLYVTLEPCVMCAGAMIH
SRIGRVVFGARDAKTGAAGSLMDVLHHPGMNHRVEITEGILADECAALLSDFFRMRRQ
EIKAQKKAQSSTDSGGSSGGSSGSETPGTSESATPESSGGSSGGSSEVEFSHEYWM
RHALTLAKRARDEREVPVGAVLVLNNRVIGEGWNRAIGLHDPTAHAEIMALRQGGLVM
QNYRLIDATLYVTFEPCVMCAGAMIHSRIGRVVFGVRNAKTGAAGSLMDVLHYPGMN
HRVEITEGILADECAALLCYFFRMPRQVFNAQKKAQSSTDSGGSSGGSSGSETPGTSE
SATPESSGGSSGGSEIGKATAKYFFYSNIMNFFKTEITLANGEIRKRPLIETNGETGEIV
WDKGRDFATVRKVLSMPQVNIVKKTEVQTGGFSKESILPKRNSDKLIARKKDWDPKKY
GGFDSPTVAYSVLVVAKVEKGKSKKLKSVKELLGITIMERSSFEKNPIDFLEAKGYKEVK
KDLIIKLPKYSLFELENGRKRMLASAGELQKGNELALPSKYVNFLYLASHYEKLKGSPE
DNEQKQLFVEQHKHYLDEIIEQISEFSKRVILADANLDKVLSAYNKHRDKPIREQAENIIH
LFTLTNLGAPAAFKYFDTTIDRKRYTSTKEVLDATLIHQSITGLYETRIDLSQLGGDGGS
GGSGGSGGSGGSGGSGGMDKKYSIGLAIGTNSVGWAVITDEYKVPSKKFKVLGNTDR
HSIKKNLIGALLFDSGETAEATRLKRTARRRYTRRKNRICYLQEIFSNEMAKVDDSFFHR
LEESFLVEEDKKHERHPIFGNIVDEVAYHEKYPTIYHLRKKLVDSTDKADLRLIYLALAH
MIKFRGHFLIEGDLNPDNSDVDKLFIQLVQTYNQLFEENPINASGVDAKAILSARLSKSR
RLENLIAQLPGEKKNGLFGNLIALSLGLTPNFKSNFDLAEDAKLQLSKDTYDDDLDNLLA
QIGDQYADLFLAAKNLSDAILLSDILRVNTEITKAPLSASMIKRYDEHHQDLTLLKALVRQ
QLPEKYKEIFFDQSKNGYAGYIDGGASQEEFYKFIKPILEKMDGTEELLVKLNREDLLRK
QRTFDNGSIPHQIHLGELHAILRRQEDFYPFLKDNREKIEKILTFRIPYYVGPLARGNSRF
AWMTRKSEETITPWNFEEVVDKGASAQSFIERMTNFDKNLPNEKVLPKHSLLYEYFTV
YNELTKVKYVTEGMRKPAFLSGEQKKAIVDLLFKTNRKVTVKQLKEDYFKKIECFDSVEI
SGVEDRFNASLGTYHDLLKIIKDKDFLDNEENEDILEDIVLTLTLFEDREMIEERLKTYAH
LFDDKVMKQLKRRRYTGWGRLSRKLINGIRDKQSGKTILDFLKSDGFANRNFMQLIHD
DSLTFKEDIQKAQVSGQGDSLHEHIANLAGSPAIKKGILQTVKVVDELVKVMGRHKPEN
IVIEMARENQTTQKGQKNSRERMKRIEEGIKELGSQILKEHPVENTQLQNEKLYLYYLQ
NGRDMYVDQELDINRLSDYDVDHIVPQSFLKDDSIDNKVLTRSDKNRGKSDNVPSEEV
VKKMKNYWRQLLNAKLITQRKFDNLTKAERGGLSELDKAGFIKRQLVETRQITKHVAQI
LDSRMNTKYDENDKLIREVKVITLKSKLVSDFRKDFQFYKVREINNYHHAHDAYLNAVV
GTALIKKYPKLESEFVYGDYKVYDVRKMIAKSEQSGGSKRTADGSEFEPKKKRKV
CP1041-ABEmax (SEQ ID NO: 79)
(SEQ ID NO: 79)
MKRTADGSEFESPKKKRKVSEVEFSHEYWMRHALTLAKRAWDEREVPVGAVLVHN
NRVIGEGWNRPIGRHDPTAHAEIMALRQGGLVMQNYRLIDATLYVTLEPCVMCAGAMIH
SRIGRVVFGARDAKTGAAGSLMDVLHHPGMNHRVEITEGILADECAALLSDFFRMRRQ
EIKAQKKAQSSTDSGGSSGGSSGSETPGTSESATPESSGGSSGGSSEVEFSHEYWM
RHALTLAKRARDEREVPVGAVLVLNNRVIGEGWNRAIGLHDPTAHAEIMALRQGGLVM
QNYRLIDATLYVTFEPCVMCAGAMIHSRIGRVVFGVRNAKTGAAGSLMDVLHYPGMN
HRVEITEGILADECAALLCYFFRMPRQVFNAQKKAQSSTDSGGSSGGSSGSETPGTSE
SATPESSGGSSGGSNIMNFFKTEITLANGEIRKRPLIETNGETGEIVWDKGRDFATVRK
VLSMPQVNIVKKTEVQTGGFSKESILPKRNSDKLIARKKDWDPKKYGGFDSPTVAYSV
LVVAKVEKGKSKKLKSVKELLGITIMERSSFEKNPIDFLEAKGYKEVKKDLIIKLPKYSLF
ELENGRKRMLASAGELQKGNELALPSKYVNFLYLASHYEKLKGSPEDNEQKQLFVEQ
HKHYLDEIIEQISEFSKRVILADANLDKVLSAYNKHRDKPIREQAENIIHLFTLTNLGAPAA
FKYFDTTIDRKRYTSTKEVLDATLIHQSITGLYETRIDLSQLGGDGGSGGSGGSGGSGG
SGGSGGDKKYSIGLAIGTNSVGWAVITDEYKVPSKKFKVLGNTDRHSIKKNLIGALLFD
SGETAEATRLKRTARRRYTRRKNRICYLQEIFSNEMAKVDDSFFHRLEESFLVEEDKK
HERHPIFGNIVDEVAYHEKYPTIYHLRKKLVDSTDKADLRLIYLALAHMIKFRGHFLIEGD
LNPDNSDVDKLFIQLVQTYNQLFEENPINASGVDAKAILSARLSKSRRLENLIAQLPGEK
KNGLFGNLIALSLGLTPNFKSNFDLAEDAKLQLSKDTYDDDLDNLLAQIGDQYADLFLA
AKNLSDAILLSDILRVNTEITKAPLSASMIKRYDEHHQDLTLLKALVRQQLPEKYKEIFFD
QSKNGYAGYIDGGASQEEFYKFIKPILEKMDGTEELLVKLNREDLLRKQRTFDNGSIPH
QIHLGELHAILRRQEDFYPFLKDNREKIEKILTFRIPYYVGPLARGNSRFAWMTRKSEET
ITPWNFEEVVDKGASAQSFIERMTNFDKNLPNEKVLPKHSLLYEYFTVYNELTKVKYVT
EGMRKPAFLSGEQKKAIVDLLFKTNRKVTVKQLKEDYFKKIECFDSVEISGVEDRFNAS
LGTYHDLLKIIKDKDFLDNEENEDILEDIVLTLTLFEDREMIEERLKTYAHLFDDKVMKQL
KRRRYTGWGRLSRKLINGIRDKQSGKTILDFLKSDGFANRNFMQLIHDDSLTFKEDIQK
AQVSGQGDSLHEHIANLAGSPAIKKGILQTVKVVDELVKVMGRHKPENIVIEMARENQT
TQKGQKNSRERMKRIEEGIKELGSQILKEHPVENTQLQNEKLYLYYLQNGRDMYVDQE
LDINRLSDYDVDHIVPQSFLKDDSIDNKVLTRSDKNRGKSDNVPSEEVVKKMKNYWRQ
LLNAKLITQRKFDNLTKAERGGLSELDKAGFIKRQLVETRQITKHVAQILDSRMNTKYDE
NDKLIREVKVITLKSKLVSDFRKDFQFYKVREINNYHHAHDAYLNAVVGTALIKKYPKLE
SEFVYGDYKVYDVRKMIAKSEQEIGKATAKYFFYSSGGSKRTADGSEFEPKKKRKV
CP1249-ABEmax (SEQ ID NO: 80)
(SEQ ID NO: 80)
MKRTADGSEFESPKKKRKVSEVEFSHEYWMRHALTLAKRAWDEREVPVGAVLVHN
NRVIGEGWNRPIGRHDPTAHAEIMALRQGGLVMQNYRLIDATLYVTLEPCVMCAGAMIH
SRIGRVVFGARDAKTGAAGSLMDVLHHPGMNHRVEITEGILADECAALLSDFFRMRRQ
EIKAQKKAQSSTDSGGSSGGSSGSETPGTSESATPESSGGSSGGSSEVEFSHEYWM
RHALTLAKRARDEREVPVGAVLVLNNRVIGEGWNRAIGLHDPTAHAEIMALRQGGLVM
QNYRLIDATLYVTFEPCVMCAGAMIHSRIGRVVFGVRNAKTGAAGSLMDVLHYPGMN
HRVEITEGILADECAALLCYFFRMPRQVFNAQKKAQSSTDSGGSSGGSSGSETPGTSE
SATPESSGGSSGGSPEDNEQKQLFVEQHKHYLDEIIEQISEFSKRVILADANLDKVLSA
YNKHRDKPIREQAENIIHLFTLTNLGAPAAFKYFDTTIDRKRYTSTKEVLDATLIHQSITGL
YETRIDLSQLGGDGGSGGSGGSGGSGGSGGSGGMDKKYSIGLAIGTNSVGWAVITDE
YKVPSKKFKVLGNTDRHSIKKNLIGALLFDSGETAEATRLKRTARRRYTRRKNRICYLQ
EIFSNEMAKVDDSFFHRLEESFLVEEDKKHERHPIFGNIVDEVAYHEKYPTIYHLRKKLV
DSTDKADLRLIYLALAHMIKFRGHFLIEGDLNPDNSDVDKLFIQLVQTYNQLFEENPINA
SGVDAKAILSARLSKSRRLENLIAQLPGEKKNGLFGNLIALSLGLTPNFKSNFDLAEDAK
LQLSKDTYDDDLDNLLAQIGDQYADLFLAAKNLSDAILLSDILRVNTEITKAPLSASMIKR
YDEHHQDLTLLKALVRQQLPEKYKEIFFDQSKNGYAGYIDGGASQEEFYKFIKPILEKM
DGTEELLVKLNREDLLRKQRTFDNGSIPHQIHLGELHAILRRQEDFYPFLKDNREKIEKIL
TFRIPYYVGPLARGNSRFAWMTRKSEETITPWNFEEVVDKGASAQSFIERMTNFDKNL
PNEKVLPKHSLLYEYFTVYNELTKVKYVTEGMRKPAFLSGEQKKAIVDLLFKTNRKVTV
KQLKEDYFKKIECFDSVEISGVEDRFNASLGTYHDLLKIIKDKDFLDNEENEDILEDIVLTL
TLFEDREMIEERLKTYAHLFDDKVMKQLKRRRYTGWGRLSRKLINGIRDKQSGKTILDF
LKSDGFANRNFMQLIHDDSLTFKEDIQKAQVSGQGDSLHEHIANLAGSPAIKKGILQTV
KVVDELVKVMGRHKPENIVIEMARENQTTQKGQKNSRERMKRIEEGIKELGSQILKEHP
VENTQLQNEKLYLYYLQNGRDMYVDQELDINRLSDYDVDHIVPQSFLKDDSIDNKVLTR
SDKNRGKSDNVPSEEVVKKMKNYWRQLLNAKLITQRKFDNLTKAERGGLSELDKAGFI
KRQLVETRQITKHVAQILDSRMNTKYDENDKLIREVKVITLKSKLVSDFRKDFQFYKVRE
INNYHHAHDAYLNAVVGTALIKKYPKLESEFVYGDYKVYDVRKMIAKSEQEIGKATAKY
FFYSNIMNFFKTEITLANGEIRKRPLIETNGETGEIVWDKGRDFATVRKVLSMPQVNIVK
KTEVQTGGFSKESILPKRNSDKLIARKKDWDPKKYGGFDSPTVAYSVLVVAKVEKGKS
KKLKSVKELLGITIMERSSFEKNPIDFLEAKGYKEVKKDLIIKLPKYSLFELENGRKRMLA
SAGELQKGNELALPSKYVNFLYLASHYEKLKGSSGGSKRTADGSEFEPKKKRKV
CP1300-ABEmax (SEQ ID NO: 81)
(SEQ ID NO: 81)
MKRTADGSEFESPKKKRKVSEVEFSHEYWMRHALTLAKRAWDEREVPVGAVLVHN
NRVIGEGWNRPIGRHDPTAHAEIMALRQGGLVMQNYRLIDATLYVTLEPCVMCAGAMIH
SRIGRVVFGARDAKTGAAGSLMDVLHHPGMNHRVEITEGILADECAALLSDFFRMRRQ
EIKAQKKAQSSTDSGGSSGGSSGSETPGTSESATPESSGGSSGGSSEVEFSHEYWM
RHALTLAKRARDEREVPVGAVLVLNNRVIGEGWNRAIGLHDPTAHAEIMALRQGGLVM
QNYRLIDATLYVTFEPCVMCAGAMIHSRIGRVVFGVRNAKTGAAGSLMDVLHYPGMN
HRVEITEGILADECAALLCYFFRMPRQVFNAQKKAQSSTDSGGSSGGSSGSETPGTSE
SATPESSGGSSGGSKPIREQAENIIHLFTLTNLGAPAAFKYFDTTIDRKRYTSTKEVLDA
TLIHQSITGLYETRIDLSQLGGDGGSGGSGGSGGSGGSGGSGGDKKYSIGLAIGTNSV
GWAVITDEYKVPSKKFKVLGNTDRHSIKKNLIGALLFDSGETAEATRLKRTARRRYTRR
KNRICYLQEIFSNEMAKVDDSFFHRLEESFLVEEDKKHERHPIFGNIVDEVAYHEKYPTI
YHLRKKLVDSTDKADLRLIYLALAHMIKFRGHFLIEGDLNPDNSDVDKLFIQLVQTYNQL
FEENPINASGVDAKAILSARLSKSRRLENLIAQLPGEKKNGLFGNLIALSLGLTPNFKSN
FDLAEDAKLQLSKDTYDDDLDNLLAQIGDQYADLFLAAKNLSDAILLSDILRVNTEITKAP
LSASMIKRYDEHHQDLTLLKALVRQQLPEKYKEIFFDQSKNGYAGYIDGGASQEEFYKF
IKPILEKMDGTEELLVKLNREDLLRKQRTFDNGSIPHQIHLGELHAILRRQEDFYPFLKD
NREKIEKILTFRIPYYVGPLARGNSRFAWMTRKSEETITPWNFEEVVDKGASAQSFIER
MTNFDKNLPNEKVLPKHSLLYEYFTVYNELTKVKYVTEGMRKPAFLSGEQKKAIVDLLF
KTNRKVTVKQLKEDYFKKIECFDSVEISGVEDRFNASLGTYHDLLKIIKDKDFLDNEENE
DILEDIVLTLTLFEDREMIEERLKTYAHLFDDKVMKQLKRRRYTGWGRLSRKLINGIRDK
QSGKTILDFLKSDGFANRNFMQLIHDDSLTFKEDIQKAQVSGQGDSLHEHIANLAGSPA
IKKGILQTVKVVDELVKVMGRHKPENIVIEMARENQTTQKGQKNSRERMKRIEEGIKEL
GSQILKEHPVENTQLQNEKLYLYYLQNGRDMYVDQELDINRLSDYDVDHIVPQSFLKD
DSIDNKVLTRSDKNRGKSDNVPSEEVVKKMKNYWRQLLNAKLITQRKFDNLTKAERG
GLSELDKAGFIKRQLVETRQITKHVAQILDSRMNTKYDENDKLIREVKVITLKSKLVSDF
RKDFQFYKVREINNYHHAHDAYLNAVVGTALIKKYPKLESEFVYGDYKVYDVRKMIAKS
EQEIGKATAKYFFYSNIMNFFKTEITLANGEIRKRPLIETNGETGEIVWDKGRDFATVRK
VLSMPQVNIVKKTEVQTGGFSKESILPKRNSDKLIARKKDWDPKKYGGFDSPTVAYSV
LVVAKVEKGKSKKLKSVKELLGITIMERSSFEKNPIDFLEAKGYKEVKKDLIIKLPKYSLF
ELENGRKRMLASAGELQKGNELALPSKYVNFLYLASHYEKLKGSPEDNEQKQLFVEQ
HKHYLDEIIEQISEFSKRVILADANLDKVLSAYNKHRDSGGSKRTADGSEFEPKKKRKV.

[0531] In some embodiments, the fusion proteins provided herein do not comprise a linker. In some embodiments, a linker is present between one or more of the domains or proteins (e.g., adenosine deaminase, napDNAbp, and/or NLS). In some embodiments, the “]-[” used in the general architecture above indicates the presence of an optional linker.

[0532] In some embodiments, the fusion proteins provided herein do not comprise a linker. In some embodiments, a linker is present between one or more of the domains or proteins (e.g., first adenosine deaminase, second adenosine deaminase, napDNAbp, and/or NLS). In some embodiments, the “H” used in the general architecture above indicates the presence of an optional linker.

[0533] It should be appreciated that the fusion proteins of the present disclosure may comprise one or more additional features. For example, in some embodiments, the fusion protein may comprise cytoplasmic localization sequences, export sequences, such as nuclear export sequences, or other localization sequences, as well as sequence tags that are useful for solubilization, purification, or detection of the fusion proteins. Suitable protein tags provided herein include, but are not limited to, biotin carboxylase carrier protein (BCCP) tags, myc-tags, calmodulin-tags, FLAG-tags, hemagglutinin (HA)-tags, polyhistidine tags, also referred to as histidine tags or His-tags, maltose binding protein (MBP)-tags, nus-tags, glutathione-S-transferase (GST)-tags, green fluorescent protein (GFP)-tags, thioredoxin-tags, S-tags, Softags (e.g., Softag 1, Softag 3), strep-tags, biotin ligase tags, FlAsH tags, V5 tags, and SBP-tags. Additional suitable sequences will be apparent to those of skill in the art. In some embodiments, the fusion protein comprises one or more His tags.

### Guide RNA

[0534] Some aspects of the invention relate to guide sequences (“guide RNA” or “gRNA”) that are capable of guiding a napDNAbp or a base editor comprising a napDNAbp to a target site in a DNA molecule (e.g., a genome at a mutation site). In various embodiments, the base editors described herein may be complexed, bound, or otherwise associated with (e.g., via any type of covalent or non-covalent bond) one or more guide sequences, i.e., the sequence which becomes associated or bound to the base editor and directs its localization to a specific target sequence having complementarity to the guide sequence or a portion thereof. The particular design embodiments of a guide sequence will depend upon the nucleotide sequence of a genomic target site of interest (i.e., the desired site to be edited) and the type of napDNAbp (e.g., type of Cas protein) present in the base editor, among other factors, such as PAM sequence locations, percent G/C content in the target sequence, the degree of microhomology regions, secondary structures, etc.

[0535] In general, a guide sequence is any polynucleotide sequence having sufficient complementarity with a target polynucleotide sequence to hybridize with the target sequence and direct sequence-specific binding of a napDNAbp (e.g., a Cas9, Cas9 homolog, or Cas9 variant) to the target sequence. In some embodiments, the degree of complementarity between a guide sequence and its corresponding target sequence, when optimally aligned using a suitable alignment algorithm, is about or more than about 50%, 60%, 75%, 80%, 85%, 90%, 95%, 97.5%, 99%, or more. Optimal alignment may be determined with the use of any suitable algorithm for aligning sequences, non-limiting example of which include the Smith-Waterman algorithm, the Needleman-Wunsch algorithm, algorithms based on the Burrows-Wheeler Transform (e.g. the Burrows Wheeler Aligner), ClustalW, Clustal X, BLAT, Novoalign (Novocraft Technologies, ELAND (Illumina, San Diego, Calif.), SOAP (available at soap.genomics.org.cn), and Maq (available at maq.sourceforge.net). In some embodiments, a guide sequence is about or more than about 5, 10, 11, 12, 13, 14, 15, 16, 17, 18, 19, 20, 21, 22, 23, 24, 25, 26, 27, 28, 29, 30, 35, 40, 45, 50, 75, or more nucleotides in length.

[0536] In some embodiments, a guide sequence is less than about 75, 50, 45, 40, 35, 30, 25, 20, 15, 12, or fewer nucleotides in length. The ability of a guide sequence to direct sequence-specific binding of a base editor to a target sequence may be assessed by any suitable assay. For example, the components of a base editor, including the guide sequence to be tested, may be provided to a host cell having the corresponding target sequence, such as by transfection with vectors encoding the components of a base editor disclosed herein, followed by an assessment of preferential cleavage within the target sequence, such as by Surveyor assay as described herein. Similarly, cleavage of a target polynucleotide sequence may be evaluated in a test tube by providing the target sequence, components of a base editor, including the guide sequence to be tested and a control guide sequence different from the test guide sequence, and comparing binding or rate of cleavage at the target sequence between the test and control guide sequence reactions. Other assays are possible, and will occur to those skilled in the art.

[0537] A guide sequence may be selected to target any target sequence. In some embodiments, the target sequence is a sequence within a genome of a cell. Exemplary target sequences include those that are unique in the target genome. For example, for the S. pyogenes Cas9, a unique target sequence in a genome may include a Cas9 target site of the form MMMMMMMMNNNNNNNNNNNNXGG (SEQ ID NO: 86) where NNNNNNNNNNNNXGG (N is A, G, T, or C; and X can be anything) (SEQ ID NO: 87) has a single occurrence in the genome. A unique target sequence in a genome may include an S. pyogenes Cas9 target site of the form MMMMMMMMMNNNNNNNNNNNXGG (SEQ ID NO: 88) where NNNNNNNNNNNXGG (N is A, G, T, or C; and X can be anything) (SEQ ID NO: 89) has a single occurrence in the genome. For the S. thermophilus CRISPR1Cas9, a unique target sequence in a genome may include a Cas9 target site of the form MMMMMMMMNNNNNNNNNNNNXXAGAAW (SEQ ID NO: 90) where NNNNNNNNNNNNXXAGAAW (N is A, G, T, or C; X can be anything; and W is A or T) (SEQ ID NO: 91) has a single occurrence in the genome. A unique target sequence in a genome may include an S. thermophilus CRISPR 1 Cas9 target site of the form MMMMMMMMMNNNNNNNNNNNXXAGAAW (SEQ ID NO: 92) where NNNNNNNNNNNXXAGAAW (N is A, G, T, or C; X can be anything; and W is A or T) (SEQ ID NO: 93) has a single occurrence in the genome. For the S. pyogenes Cas9, a unique target sequence in a genome may include a Cas9 target site of the form MMMMMMMMNNNNNNNNNNNNXGGXG (SEQ ID NO: 94) where NNNNNNNNNNNNXGGXG (N is A, G, T, or C; and X can be anything) (SEQ ID NO: 95) has a single occurrence in the genome. A unique target sequence in a genome may include an S. pyogenes Cas9 target site of the form MMMMMMMMMNNNNNNNNNNNXGGXG (SEQ ID NO: 96) where NNNNNNNNNNNXGGXG (N is A, G, T, or C; and X can be anything) (SEQ ID NO: 97) has a single occurrence in the genome. In each of these sequences “M” may be A, G, T, or C, and need not be considered in identifying a sequence as unique.

[0538] In some embodiments, a guide sequence is selected to reduce the degree of secondary structure within the guide sequence. Secondary structure may be determined by any suitable polynucleotide folding algorithm. Some programs are based on calculating the minimal Gibbs free energy. An example of one such algorithm is mFold, as described by Zuker & Stiegler (Nucleic Acids Res. 9 (1981), 133-148). Another example folding algorithm is the online webserver RNAfold, developed at Institute for Theoretical Chemistry at the University of Vienna, using the centroid structure prediction algorithm (see, e.g., A. R. Gruber et al., 2008, Cell 106(1): 23-24; and P A Carr & G M Church, 2009, Nature Biotechnology 27(12): 1151-62). Additional algorithms may be found in Chuai, G. et al., DeepCRISPR: optimized CRISPR guide RNA design by deep learning, Genome Biol. 19:80 (2018), and U.S. application Ser. No. 61/836,080, the entireties of each of which are incorporated herein by reference.

[0539] In general, a tracr mate sequence includes any sequence that has sufficient complementarity with a tracr sequence to promote one or more of: (1) excision of a guide sequence flanked by tracr mate sequences in a cell containing the corresponding tracr sequence; and (2) formation of a complex at a target sequence, wherein the complex comprises the tracr mate sequence hybridized to the tracr sequence. In general, degree of complementarity is with reference to the optimal alignment of the tracr mate sequence and tracr sequence, along the length of the shorter of the two sequences. Optimal alignment may be determined by any suitable alignment algorithm, and may further account for secondary structures, such as self-complementarity within either the tracr sequence or tracr mate sequence. In some embodiments, the degree of complementarity between the tracr sequence and tracr mate sequence along the length of the shorter of the two when optimally aligned is about or more than about 25%, 30%, 40%, 50%, 60%, 70%, 80%, 90%, 95%, 97.5%, 99%, or higher. In some embodiments, the tracr sequence is about or more than about 5, 6, 7, 8, 9, 10, 11, 12, 13, 14, 15, 16, 17, 18, 19, 20, 25, 30, 40, 50, or more nucleotides in length. In some embodiments, the tracr sequence and tracr mate sequence are contained within a single transcript, such that hybridization between the two produces a transcript having a secondary structure, such as a hairpin. Preferred loop forming sequences for use in hairpin structures are four nucleotides in length, and most preferably have the sequence GAAA. However, longer or shorter loop sequences may be used, as may alternative sequences. The sequences preferably include a nucleotide triplet (for example, AAA), and an additional nucleotide (for example C or G). Examples of loop forming sequences include CAAA and AAAG. In an embodiment of the disclosure, the transcript or transcribed polynucleotide sequence has at least two or more hairpins. In certain embodiments, the transcript has two, three, four or five hairpins. In a further embodiment of the disclosure, the transcript has at most five hairpins. In some embodiments, the single transcript further includes a transcription termination sequence; preferably this is a polyT sequence, for example six T nucleotides. Further non-limiting examples of single polynucleotides comprising a guide sequence, a tracr mate sequence, and a tracr sequence are as follows (listed 5′ to 3′), where “N” represents a base of a guide sequence, the first block of lower case letters represent the tracr mate sequence, and the second block of lower case letters represent the tracr sequence, and the final poly-T sequence represents the transcription terminator:

(1)
(SEQ ID NO: 98)
NNNNNNNNgtttttgtactctcaagatttaGAAAtaaatcttgcagaa
gctacaaagataaggcttcatgccgaaatcaacaccctgtcattttat
ggcagggtgttttcgttatttaaTTTTTT;
(2)
(SEQ ID NO: 99)
NNNNNNNNNNNNNNNNNNgtttttgtactctcaGAAAtgcagaagcta
caaagataaggcttcatgccgaaatcaacaccctgtcattttatggca
gggtgttttcgttatttaaTTTTTT;
(3)
(SEQ ID NO: 100)
NNNNNNNNNNNNNNNNNNNNgtttttgtactctcaGAAAtgcagaagc
tacaaagataaggcttcatgccgaaatca acaccctgtcattttatg
gcagggtgtTTTTT;
(4)
(SEQ ID NO: 101)
NNNNNNNNNNNNNNNNNNNNgttttagagctaGAAAtagcaagttaaa
ataaggctagtccgttatcaacttgaaaa agtggcaccgagtcggtg
cTTTTTT;
(5)
(SEQ ID NO: 102)
NNNNNNNNNNNNNNNNNNNNgttttagagctaGAAATAGcaagttaaa
ataaggctagtccgttatcaacttgaa aaagtgTTTTTTT;
and
(6)
(SEQ ID NO: 103)
NNNNNNNNNNNNNNNNNNNNgttttagagctagAAATAGcaagttaaa
ataaggctagtccgttatcaTTTTT TTT.

[0540] In some embodiments, sequences (1) to (3) are used in combination with Cas9 from S. thermophilus CRISPR1. In some embodiments, sequences (4) to (6) are used in combination with Cas9 from S. pyogenes. In some embodiments, the tracr sequence is a separate transcript from a transcript comprising the tracr mate sequence.

[0541] It will be apparent to those of skill in the art that in order to target any of the fusion proteins comprising a Cas9 domain and a thymine alkyltransferase, as disclosed herein, to a target site, e.g., a site comprising a point mutation to be edited, it is typically necessary to co-express the fusion protein together with a guide RNA, e.g., an sgRNA. As explained in more detail elsewhere herein, a guide RNA typically comprises a tracrRNA framework allowing for Cas9 binding, and a guide sequence, which confers sequence specificity to the Cas9:nucleic acid editing enzyme/domain fusion protein.

[0542] In some embodiments, the guide RNA comprises a structure 5′-[guide sequence]-guuuuagagcuagaaauagcaaguuaaaauaaggcuaguccguuaucaacuugaaaaaguggcaccgagucggugcuuu uu-3′ (SEQ ID NO: 104), wherein the guide sequence comprises a sequence that is complementary to the target sequence. See U.S. Publication No. 2015/0166981, published Jun. 18, 2015, the disclosure of which is incorporated by reference herein in its entirety. The guide sequence is typically 20 nucleotides long.

[0543] The sequences of suitable guide RNAs for targeting Cas9:nucleic acid editing enzyme/domain fusion proteins to specific genomic target sites will be apparent to those of skill in the art based on the instant disclosure. Such suitable guide RNA sequences typically comprise guide sequences that are complementary to a nucleic sequence within 50 nucleotides upstream or downstream of the target nucleotide to be edited. Some exemplary guide RNA sequences suitable for targeting any of the provided fusion proteins to specific target sequences are provided herein. Additional guide sequences are well known in the art and can be used with the base editors described herein.

[0544] Additional exemplary guide sequences are disclosed in, for example, Jinek M., et al., Science 337:816-821(2012); Mali P, Esvelt K M & Church G M (2013) Cas9 as a versatile tool for engineering biology, Nature Methods, 10, 957-963; Li J F et al., (2013) Multiplex and homologous recombination-mediated genome editing in Arabidopsis and Nicotiana benthamiana using guide RNA and Cas9, Nature Biotechnology, 31, 688-691; Hwang, W. Y. et al., Efficient genome editing in zebrafish using a CRISPR-Cas system, Nature Biotechnology 31, 227-229 (2013); Cong L et al., (2013) Multiplex genome engineering using CRIPSR/Cas systems, Science, 339, 819-823; Cho S W et al., (2013) Targeted genome engineering in human cells with the Cas9 RNA-guided endonuclease, Nature Biotechnology, 31, 230-232; Jinek, M. et al., RNA-programmed genome editing in human cells, eLife 2, e00471 (2013); Dicarlo, J. E. et al., Genome engineering in Saccharomyces cerevisiae using CRISPR-Cas systems. Nucleic Acid Res. (2013); Briner A E et al., (2014) Guide RNA functional modules direct Cas9 activity and orthogonality, Mol Cell, 56, 333-339, the entire contents of each of which are herein incorporated by reference.

### ABE and CBE Complexes

[0545] Some aspects of this disclosure provide complexes comprising any of the ABE and/or CBE fusion proteins (e.g., base editors) provided herein, for example any of the adenosine base editors provided herein, and a guide nucleic acid bound to napDNAbp of the fusion protein. In some embodiments, the guide nucleic acid is any one of the guide RNAs provided herein. In some embodiments, the disclosure provides any of the fusion proteins (e.g., adenosine base editors) provided herein bound to any of the guide RNAs provided herein. In some embodiments, the napDNAbp of the fusion protein (e.g., adenosine base editor) is a Cas9 domain (e.g., a dCas9, a nuclease active Cas9, or a Cas9 nickase), which is bound to a guide RNA. In some embodiments, the complexes provided herein are configured to generate a mutation in a nucleic acid, for example to change an amino acid in a gene.

[0546] In some embodiments, the guide RNA comprises a guide sequence that comprises at least 8, 9, 10, 11, 12, 13, 14, 15, 16, 17, 18, 19, 20, 21, 22, 23, 24, 25, 26, 27, 28, 29, or 30 contiguous nucleic acids that are 100% complementary to a target sequence, for example a target DNA sequence. In some embodiments, the guide RNA comprises a guide sequence that comprises at least 8, 9, 10, 11, 12, 13, 14, 15, 16, 17, 18, 19, 20, 21, 22, 23, 24, 25, 26, 27, 28, 29, or 30 contiguous nucleic acids that are 100% complementary to a DNA sequence in a target gene.

[0547] In some embodiments, any of the complexes provided herein comprise a gRNA having a guide sequence that comprises at least 8, 9, 10, 11, 12, 13, 14, 15, 16, 17, 18, 19, 20, 21, 22, 23, 24, 25, 26, 27, 28, 29, or 30 contiguous nucleic acids that are 100% complementary to any one of the nucleic acid sequences provided herein. It should be appreciated that the guide sequence of the gRNA may comprise one or more nucleotides that are not complementary to a target sequence. In some embodiments, the guide sequence of the gRNA is at the 5′ end of the gRNA. In some embodiments, the guide sequence of the gRNA further comprises a G at the 5′ end of the gRNA. In some embodiments, the G at the 5′ end of the gRNA is not complementary with the target sequence. In some embodiments, the guide sequence of the gRNA comprises 1, 2, 3, 4, 5, 6, 7, or 8 nucleotides that are not complementary to a target sequence. In some embodiments, the guide RNA comprises a guide sequence that comprises at least 8, 9, 10, 11, 12, 13, 14, 15, 16, 17, 18, 19, 20, 21, 22, 23, 24, 25, 26, 27, 28, 29, or 30 contiguous nucleic acids that are 100% complementary to a target sequence, for example a target DNA sequence in a STAT3 gene. In some embodiments, the guide RNA comprises a guide sequence that comprises at least 8, 9, 10, 11, 12, 13, 14, 15, 16, 17, 18, 19, 20, 21, 22, 23, 24, 25, 26, 27, 28, 29, or 30 contiguous nucleic acids that are 100% complementary to a DNA sequence in a human disease gene.

### Editing Methods

[0548] Some aspects of this disclosure provide methods of using the Cas9 domains, fusion proteins, or complexes provided herein, to edit a DNA sequence by base editing.

[0549] In one aspect, provided herein are methods comprising contacting a nucleic acid molecule (a) with any of the Cas9 domains or fusion proteins provided herein, and with at least one guide RNA, wherein the guide RNA is about 15-100 nucleotides long and comprises a sequence of at least 10 contiguous nucleotides that is complementary to a target sequence in the nucleic acid molecule; or (b) with a Cas9 domain, a fusion protein comprising a Cas9 domain, or a complex comprising a Cas9 domain, wherein the Cas9 domain is associated with at least one gRNA as provided herein. In some embodiments, the nucleic acid is present in a cell. In some embodiments, the nucleic acid is present in a subject. In some embodiments, the contacting is in vitro. In some embodiments, the contacting is in vivo in a subject.

[0550] In another aspect, provided herein are methods comprising contacting a cell (a) with any of the Cas9 domains or fusion proteins provided herein, and with at least one guide RNA, wherein the guide RNA is about 15-100 nucleotides long and comprises a sequence of at least 10 contiguous nucleotides that is complementary to a target sequence in the nucleic acid molecule; or (b) with a Cas9 domain, a fusion protein comprising a Cas9 domain, or a complex comprising a Cas9 domain, wherein the Cas9 domain is associated with at least one gRNA as provided herein. In some embodiments, the contacting is in vitro. In some embodiments, the contacting is in vivo in a subject. In some embodiments, the cell is a prokaryotic cell. In some embodiments, the prokaryotic cell is a bacterium. In some embodiments, the bacterium is E. coli. In some embodiments, the cell is a eukaryotic cell. In some embodiments, the eukaryotic cell is a mammalian cell. In some embodiments, the mammalian cell is a human cell. In some embodiments, the cell is a plant or fungal cell.

[0551] In another aspect, provided herein are methods for administering to a subject (a) any of the Cas9 domains or fusion proteins provided herein, and at least one guide RNA, wherein the guide RNA is about 15-100 nucleotides long and comprises a sequence of at least 10 contiguous nucleotides that is complementary to a target sequence in the nucleic acid molecule; or (b) a Cas9 domain, a fusion protein comprising a Cas9 domain, or a complex comprising a Cas9 domain, wherein the Cas9 domain is associated with at least one gRNA as provided herein. In some embodiments, an effective amount of the Cas9 domain, fusion protein, or complex is administered to the subject. In some embodiments, the effective amount is an amount effective for treating a disease or disorder, wherein the disease comprises one or more point mutations in a nucleic acid sequence associated with the disease or disorder.

[0552] In some embodiments, the 3′ end of the target sequence is not immediately adjacent to the canonical PAM sequence (5′-NGG-3′). In some embodiments, the 3′ end of the target sequence is directly adjacent to a sequence selected from the group consisting of NGT, NGA, NGC, and NNG, wherein N is an A, G, T, or C. In some embodiments, the 3′ end of the target sequence is directly adjacent to a sequence selected from the group consisting of CGG, AGT, TGG, AGT, CGT, GGG, CGT, TGT, GGT, AGC, CGC, TGC, GGC, AGA, CGA, TGA, GGA, GAA, GAT, and CAA.

[0553] In some embodiments, the target sequence comprises a sequence associated with a disease or disorder. In some embodiments, the target sequence comprises a point mutation associated with a disease or disorder. In some embodiments, the activity of the Cas9 domain, the Cas9 fusion protein, or the complex results in a correction of the point mutation. In some embodiments, the target sequence comprises a T→C point mutation associated with a disease or disorder, wherein the deamination of the mutant C base results in a sequence that is not associated with a disease or disorder. In some embodiments, the target sequence comprises a A→G, wherein deamination of the C that is base-paired to the mutant G base results in a sequence that is not associated with a disease or disorder. In some embodiments, the target sequence encodes a protein and wherein the point mutation is in a codon and results in a change in the amino acid encoded by the mutant codon as compared to the wild-type codon. In some embodiments, the deamination of the mutant C results in a change of the amino acid encoded by the mutant codon. In some embodiments, the deamination of the mutant C results in the codon encoding the wild-type amino acid. In some embodiments, the target DNA sequence comprises a G→A point mutation associated with a disease or disorder, and wherein the deamination of the mutant A base results in a sequence that is not associated with a disease or disorder. In some embodiments, the target DNA sequence comprises a C→T point mutation associated with a disease or disorder, wherein deamination of the A that is base-paired with the mutant T results in a sequence that is not associated with a disease or disorder.

[0554] In some embodiments, the target DNA sequence encodes a protein and wherein the point mutation is in a codon and results in a change in the amino acid encoded by the mutant codon as compared to the wild-type codon. In some embodiments, the deamination of the mutant A results in a change of the amino acid encoded by the mutant codon. In some embodiments, the deamination of the mutant A results in the codon encoding the wild-type amino acid. In some embodiments, the contacting is in vivo in a subject. In some embodiments, the subject has or has been diagnosed with a disease or disorder. In some embodiments, the disease or disorder is cystic fibrosis, phenylketonuria, epidermolytic hyperkeratosis (EHK), Charcot-Marie-Toot disease type 4J, neuroblastoma (NB), von Willebrand disease (vWD), myotonia congenital, hereditary renal amyloidosis, dilated cardiomyopathy (DCM), hereditary lymphedema, familial Alzheimer's disease, HIV, Prion disease, chronic infantile neurologic cutaneous articular syndrome (CINCA), desmin-related myopathy (DRM), a neoplastic disease associated with a mutant PI3KCA protein, a mutant CTNNB1 protein, a mutant HRAS protein, or a mutant p53 protein. In some embodiments, the target sequence comprises a sequence located in a genomic locus. In some embodiments, the genomic locus is a HEK site. In some embodiments, the HEK site is HEK site 3 or HEK site 4. In some embodiments, the HEK site comprises a CGG, GGG, TGT, GGT, AGC, CGC, TGC, AGA, or TGA PAM sequence. In some embodiments, the genomic locus is EMX1. In some embodiments, the EMX1 locus comprises a GGG or CAA PAM sequence. In some embodiments, the genomic locus is VEGFA. In some embodiments, the VEGFA locus comprises a AGT, GGC, GGA, or GAT PAM sequence. In some embodiments, the genomic locus is FANCF. In some embodiments, the FANCF locus comprises a CGT, GAA, GAT, TGG, AGT, TGT, GGT, CGC, TGC, GGC, AGA, or TGA PAM sequence.

[0555] Some embodiments provide methods for using the Cas9 DNA editing fusion proteins provided herein. In some embodiments, the fusion protein is used to introduce a point mutation into a nucleic acid by deaminating a target nucleobase, e.g., a C or A residue. In some embodiments, the deamination of the target nucleobase results in the correction of a genetic defect, e.g., in the correction of a point mutation that leads to a loss of function in a gene product. In some embodiments, the genetic defect is associated with a disease or disorder, e.g., a lysosomal storage disorder or a metabolic disease, such as, for example, type I diabetes. In some embodiments, the methods provided herein are used to introduce a deactivating point mutation into a gene or allele that encodes a gene product that is associated with a disease or disorder. For example, in some embodiments, methods are provided herein that employ a fusion protein comprising a Cas9 domain (e.g., a base editor) to introduce a deactivating point mutation into an oncogene (e.g., in the treatment of a proliferative disease). A deactivating mutation may, in some embodiments, generate a premature stop codon in a coding sequence, which results in the expression of a truncated gene product, e.g., a truncated protein lacking the function of the full-length protein.

[0556] In some embodiments, the purpose of the methods provide herein is to restore the function of a dysfunctional gene via genome editing. The Cas9-deaminase fusion proteins provided herein can be validated for gene editing-based human therapeutics in vitro, e.g., by correcting a disease-associated mutation in human cell culture. It will be understood by the skilled artisan that the fusion proteins provided herein, e.g., the fusion proteins comprising a Cas9 domain and a cytidine deaminase domain can be used to correct any single T→C or A→G point mutation. In the first case, deamination of the mutant C back to U corrects the mutation, and in the latter case, deamination of the C that is base-paired with the mutant G, followed by a round of replication, corrects the mutation. The fusion proteins comprising a Cas9 domain and one or more adenosine deaminase domains can be used to correct any single G→A or C→T point mutation. In the first case, deamination of the mutant A to I corrects the mutation, and in the latter case, deamination of the A that is base-paired with the mutant T, followed by a round of replication, corrects the mutation.

[0557] An exemplary disease-relevant mutation that can be corrected by the provided fusion proteins in vitro or in vivo is the H1047R (A3140G) polymorphism in the PI3KCA protein. The phosphoinositide-3-kinase, catalytic alpha subunit (PI3KCA) protein acts to phosphorylate the 3-OH group of the inositol ring of phosphatidylinositol. The PI3KCA gene has been found to be mutated in many different carcinomas, and thus it is considered to be a potent oncogene.⁵⁰ In fact, the A3140G mutation is present in several NCI-60 cancer cell lines, such as, for example, the HCT116, SKOV3, and T47D cell lines, which are readily available from the American Type Culture Collection (ATCC).⁵¹

[0558] In some embodiments, a cell carrying a mutation to be corrected, e.g., a cell carrying a point mutation, e.g., an A3140G point mutation in exon 20 of the PI3KCA gene, resulting in a H1047R substitution in the PI3KCA protein, is contacted with an expression construct encoding a Cas9 deaminase fusion protein and an appropriately designed sgRNA targeting the fusion protein to the respective mutation site in the encoding PI3KCA gene. Control experiments can be performed where the sgRNAs are designed to target the fusion enzymes to non-C residues that are within the PI3KCA gene. Genomic DNA of the treated cells can be extracted, and the relevant sequence of the PI3KCA genes PCR amplified and sequenced to assess the activities of the fusion proteins in human cell culture.

[0559] It will be understood that the example of correcting point mutations in PI3KCA is provided for illustration purposes and is not meant to limit the instant disclosure. The skilled artisan will understand that the instantly disclosed DNA-editing fusion proteins can be used to correct other point mutations and mutations associated with other cancers and with diseases other than cancer including other proliferative diseases.

[0560] The successful correction of point mutations in disease-associated genes and alleles opens up new strategies for gene correction with applications in therapeutics and basic research. Site-specific single-base modification systems like the disclosed fusions of Cas9 domains and deaminase domains also have applications in “reverse” gene therapy, where certain gene functions are purposely suppressed or abolished. In these cases, site-specifically mutating Trp (TGG), Gln (CAA and CAG), or Arg (CGA) residues to premature stop codons (TAA, TAG, TGA) can be used to abolish protein function in vitro, ex vivo, or in vivo.

[0561] The instant disclosure provides methods for the treatment of a subject diagnosed with a disease associated with or caused by a point mutation that can be corrected by a fusion protein comprising a Cas9 domain and nucleic acid editing domain (e.g., a deaminase domain) provided herein. For example, in some embodiments, a method is provided that comprises administering to a subject having such a disease, e.g., a cancer associated with a PI3KCA point mutation as described above, an effective amount of a Cas9 deaminase fusion protein that corrects the point mutation or introduces a deactivating mutation into the disease-associated gene. In some embodiments, the disease is a proliferative disease. In some embodiments, the disease is a genetic disease. In some embodiments, the disease is a neoplastic disease. In some embodiments, the disease is a metabolic disease. In some embodiments, the disease is a lysosomal storage disease. Other diseases that can be treated by correcting a point mutation or introducing a deactivating mutation into a disease-associated gene will be known to those of skill in the art, and the disclosure is not limited in this respect.

[0562] The instant disclosure provides methods for the treatment of additional diseases or disorders, e.g., diseases or disorders that are associated or caused by a point mutation that can be corrected by deaminase-mediated gene editing. Some such diseases are described herein, and additional suitable diseases that can be treated with the strategies and fusion proteins provided herein will be apparent to those of skill in the art based on the instant disclosure. Exemplary suitable diseases and disorders are listed below. It will be understood that the numbering of the specific positions or residues in the respective sequences depends on the particular protein and numbering scheme used. Numbering might be different, e.g., in precursors of a mature protein and the mature protein itself, and differences in sequences from species to species may affect numbering. One of skill in the art will be able to identify the respective residue in any homologous protein and in the respective encoding nucleic acid by methods well known in the art, e.g., by sequence alignment and determination of homologous residues. Exemplary suitable diseases and disorders include, without limitation, cystic fibrosis (see, e.g., Schwank et al., Functional repair of CFTR by CRISPR/Cas9 in intestinal stem cell organoids of cystic fibrosis patients. Cell stem cell. 2013; 13: 653-658; and Wu et. al., Correction of a genetic disease in mouse via use of CRISPR-Cas9. Cell stem cell. 2013; 13: 659-662, neither of which uses a deaminase fusion protein to correct the genetic defect); phenylketonuria—e.g., phenylalanine to serine mutation at position 835 (mouse) or 240 (human) or a homologous residue in phenylalanine hydroxylase gene (T>C mutation)—see, e.g., McDonald et al., Genomics. 1997; 39:402-405; Bernard-Soulier syndrome (BSS)—e.g., phenylalanine to serine mutation at position 55 or a homologous residue, or cysteine to arginine at residue 24 or a homologous residue in the platelet membrane glycoprotein IX (T>C mutation)—see, e.g., Noris et al., British Journal of Haematology. 1997; 97: 312-320, and Ali et al., Hematol. 2014; 93: 381-384; epidermolytic hyperkeratosis (EHK)—e.g., leucine to proline mutation at position 160 or 161 (if counting the initiator methionine) or a homologous residue in keratin 1 (T>C mutation)—see, e.g., Chipev et al., Cell. 1992; 70: 821-828, see also accession number P04264 in the UNIPROT database at www[dot]uniprot[dot]org; chronic obstructive pulmonary disease (COPD)—e.g., leucine to proline mutation at position 54 or 55 (if counting the initiator methionine) or a homologous residue in the processed form of α₁-antitrypsin or residue 78 in the unprocessed form or a homologous residue (T>C mutation)—see, e.g., Poller et al., Genomics. 1993; 17: 740-743, see also accession number P01011 in the UNIPROT database; Charcot-Marie-Toot disease type 4J—e.g., isoleucine to threonine mutation at position 41 or a homologous residue in FIG. 4 (T>C mutation)—see, e.g., Lenk et al., PLoS Genetics. 2011; 7: e1002104; neuroblastoma (NB)—e.g., leucine to proline mutation at position 197 or a homologous residue in Caspase-9 (T>C mutation)—see, e.g., Kundu et al., 3 Biotech. 2013, 3:225-234; von Willebrand disease (vWD)—e.g., cysteine to arginine mutation at position 509 or a homologous residue in the processed form of von Willebrand factor, or at position 1272 or a homologous residue in the unprocessed form of von Willebrand factor (T>C mutation)—see, e.g., Lavergne et al., Br. J. Haematol. 1992, see also accession number P04275 in the UNIPROT database; 82: 66-72; myotonia congenital—e.g., cysteine to arginine mutation at position 277 or a homologous residue in the muscle chloride channel gene CLCN1 (T>C mutation)—see, e.g., Weinberger et al., The J. of Physiology. 2012; 590: 3449-3464; hereditary renal amyloidosis—e.g., stop codon to arginine mutation at position 78 or a homologous residue in the processed form of apolipoprotein AII or at position 101 or a homologous residue in the unprocessed form (T>C mutation)—see, e.g., Yazaki et al., Kidney Int. 2003; 64: 11-16; dilated cardiomyopathy (DCM)—e.g., tryptophan to Arginine mutation at position 148 or a homologous residue in the FOXD4 gene (T>C mutation), see, e.g., Minoretti et. al., Int. J. of Mol. Med. 2007; 19: 369-372; hereditary lymphedema—e.g., histidine to arginine mutation at position 1035 or a homologous residue in VEGFR3 tyrosine kinase (A>G mutation), see, e.g., Irrthum et al., Am. J. Hum. Genet. 2000; 67: 295-301; familial Alzheimer's disease—e.g., isoleucine to valine mutation at position 143 or a homologous residue in presenilin1 (A>G mutation), see, e.g., Gallo et. al., J. Alzheimer's disease. 2011; 25: 425-431; Prion disease—e.g., methionine to valine mutation at position 129 or a homologous residue in prion protein (A>G mutation)—see, e.g., Lewis et. al., J. of General Virology. 2006; 87: 2443-2449; chronic infantile neurologic cutaneous articular syndrome (CINCA)—e.g., Tyrosine to Cysteine mutation at position 570 or a homologous residue in cryopyrin (A>G mutation)—see, e.g., Fujisawa et. al. Blood. 2007; 109: 2903-2911; and desmin-related myopathy (DRM)—e.g., arginine to glycine mutation at position 120 or a homologous residue in aB crystallin (A>G mutation)—see, e.g., Kumar et al., J. Biol. Chem. 1999; 274: 24137-24141. The entire contents of all references and database entries is incorporated herein by reference.

[0563] The instant disclosure contemplates genes comprising pathogenic T>C or A>G mutations, which may be corrected using a fusion protein comprising a CP-Cas9 domain and a deaminase domain provided herein. In some embodiments, a CP-Cas9-deaminase fusion protein recognizes canonical PAMs and therefore can correct the pathogenic T>C or A>G mutations with canonical PAMs, e.g., 5′-NGG-3′. It should be appreciated that a skilled artisan would understand how to design an RNA (e.g., a gRNA) to target any of the CP-Cas9 domains or fusion proteins provided herein to any target sequence in order to correct any pathogenic T>C or A>G mutations. It will be apparent to those of skill in the art that in order to target a CP-Cas9:effector domain fusion protein as disclosed herein to a target site, e.g., a site comprising a point mutation to be edited, it is typically necessary to co-express the CP-Cas9:effector domain fusion protein together with a guide RNA, e.g., an sgRNA. As explained in more detail elsewhere herein, a guide RNA typically comprises a tracrRNA framework allowing for Cas9 binding, and a guide sequence, which confers sequence specificity to the Cas9:effector domain fusion protein. In some embodiments, the guide RNA comprises a structure 5′-[guide sequence]-guuuuagagcuagaaauagcaaguuaaaauaaaggcuaguccguuaucaacuugaaaaaguggcaccgagucggugcuu uuu-3′ (SEQ ID NO: 116), wherein the guide sequence comprises a sequence that is complementary to the target sequence. The guide sequence is typically 20 nucleotides long. The sequences of suitable guide RNAs for targeting Cas9:effector domain fusion proteins to specific genomic target sites will be apparent to those of skill in the art based on the instant disclosure. Such suitable guide RNA sequences typically comprise guide sequences that are complementary to a nucleic sequence within 50 nucleotides upstream or downstream of the target nucleotide to be edited.

### Pharmaceutical Compositions

[0564] Other aspects of the present disclosure relate to pharmaceutical compositions comprising any of the various components described herein (e.g., including, but not limited to, the napDNAbps, fusion proteins, guide RNAs, and complexes comprising fusion proteins and guide RNAs).

[0565] The term “pharmaceutical composition”, as used herein, refers to a composition formulated for pharmaceutical use. In some embodiments, the pharmaceutical composition further comprises a pharmaceutically acceptable carrier. In some embodiments, the pharmaceutical composition comprises additional agents (e.g. for specific delivery, increasing half-life, or other therapeutic compounds).

[0566] As used here, the term “pharmaceutically-acceptable carrier” means a pharmaceutically-acceptable material, composition or vehicle, such as a liquid or solid filler, diluent, excipient, manufacturing aid (e.g., lubricant, talc magnesium, calcium or zinc stearate, or steric acid), or solvent encapsulating material, involved in carrying or transporting the compound from one site (e.g., the delivery site) of the body, to another site (e.g., organ, tissue or portion of the body). A pharmaceutically acceptable carrier is “acceptable” in the sense of being compatible with the other ingredients of the formulation and not injurious to the tissue of the subject (e.g., physiologically compatible, sterile, physiologic pH, etc.). Some examples of materials which can serve as pharmaceutically-acceptable carriers include: (1) sugars, such as lactose, glucose and sucrose; (2) starches, such as corn starch and potato starch; (3) cellulose, and its derivatives, such as sodium carboxymethyl cellulose, methylcellulose, ethyl cellulose, microcrystalline cellulose and cellulose acetate; (4) powdered tragacanth; (5) malt; (6) gelatin; (7) lubricating agents, such as magnesium stearate, sodium lauryl sulfate and talc; (8) excipients, such as cocoa butter and suppository waxes; (9) oils, such as peanut oil, cottonseed oil, safflower oil, sesame oil, olive oil, corn oil and soybean oil; (10) glycols, such as propylene glycol; (11) polyols, such as glycerin, sorbitol, mannitol and polyethylene glycol (PEG); (12) esters, such as ethyl oleate and ethyl laurate; (13) agar; (14) buffering agents, such as magnesium hydroxide and aluminum hydroxide; (15) alginic acid; (16) pyrogen-free water; (17) isotonic saline; (18) Ringer's solution; (19) ethyl alcohol; (20) pH buffered solutions; (21) polyesters, polycarbonates and/or polyanhydrides; (22) bulking agents, such as polypeptides and amino acids (23) serum component, such as serum albumin, HDL and LDL; (22) C2-C12 alcohols, such as ethanol; and (23) other non-toxic compatible substances employed in pharmaceutical formulations. Wetting agents, coloring agents, release agents, coating agents, sweetening agents, flavoring agents, perfuming agents, preservative and antioxidants can also be present in the formulation. The terms such as “excipient”, “carrier”, “pharmaceutically acceptable carrier” or the like are used interchangeably herein.

[0567] In some embodiments, the pharmaceutical composition is formulated for delivery to a subject, e.g., for gene editing. Suitable routes of administrating the pharmaceutical composition described herein include, without limitation: topical, subcutaneous, transdermal, intradermal, intralesional, intraarticular, intraperitoneal, intravesical, transmucosal, gingival, intradental, intracochlear, transtympanic, intraorgan, epidural, intrathecal, intramuscular, intravenous, intravascular, intraosseus, periocular, intratumoral, intracerebral, and intracerebroventricular administration.

[0568] In some embodiments, the pharmaceutical composition described herein is administered locally to a diseased site (e.g., tumor site). In some embodiments, the pharmaceutical composition described herein is administered to a subject by injection, by means of a catheter, by means of a suppository, or by means of an implant, the implant being of a porous, non-porous, or gelatinous material, including a membrane, such as a sialastic membrane, or a fiber.

[0569] In other embodiments, the pharmaceutical composition described herein is delivered in a controlled release system. In one embodiment, a pump may be used (see, e.g., Langer, 1990, Science 249:1527-1533; Sefton, 1989, CRC Crit. Ref. Biomed. Eng. 14:201; Buchwald et al., 1980, Surgery 88:507; Saudek et al., 1989, N. Engl. J. Med. 321:574). In another embodiment, polymeric materials can be used. (See, e.g., Medical Applications of Controlled Release (Langer and Wise eds., CRC Press, Boca Raton, Fla., 1974); Controlled Drug Bioavailability, Drug Product Design and Performance (Smolen and Ball eds., Wiley, New York, 1984); Ranger and Peppas, 1983, Macromol. Sci. Rev. Macromol. Chem. 23:61. See also Levy et al., 1985, Science 228:190; During et al., 1989, Ann. Neurol. 25:351; Howard et al., 1989, J. Neurosurg. 71:105.) Other controlled release systems are discussed, for example, in Langer, supra.

[0570] In some embodiments, the pharmaceutical composition is formulated in accordance with routine procedures as a composition adapted for intravenous or subcutaneous administration to a subject, e.g., a human. In some embodiments, pharmaceutical composition for administration by injection are solutions in sterile isotonic aqueous buffer. Where necessary, the pharmaceutical can also include a solubilizing agent and a local anesthetic such as lignocaine to ease pain at the site of the injection. Generally, the ingredients are supplied either separately or mixed together in unit dosage form, for example, as a dry lyophilized powder or water free concentrate in a hermetically sealed container such as an ampoule or sachette indicating the quantity of active agent. Where the pharmaceutical is to be administered by infusion, it can be dispensed with an infusion bottle containing sterile pharmaceutical grade water or saline. Where the pharmaceutical composition is administered by injection, an ampoule of sterile water for injection or saline can be provided so that the ingredients can be mixed prior to administration.

[0571] A pharmaceutical composition for systemic administration may be a liquid, e.g., sterile saline, lactated Ringer's or Hank's solution. In addition, the pharmaceutical composition can be in solid forms and re-dissolved or suspended immediately prior to use. Lyophilized forms are also contemplated.

[0572] The pharmaceutical composition can be contained within a lipid particle or vesicle, such as a liposome or microcrystal, which is also suitable for parenteral administration. The particles can be of any suitable structure, such as unilamellar or plurilamellar, so long as compositions are contained therein. Compounds can be entrapped in “stabilized plasmid-lipid particles” (SPLP) containing the fusogenic lipid dioleoylphosphatidylethanolamine (DOPE), low levels (5-10 mol %) of cationic lipid, and stabilized by a polyethyleneglycol (PEG) coating (Zhang Y. P. et al., Gene Ther. 1999, 6:1438-47). Positively charged lipids such as N-[1-(2,3-dioleoyloxi)propyl]-N,N,N-trimethyl-amoniummethylsulfate, are particularly preferred for such particles and vesicles. The preparation of such lipid particles is well known. See, e.g., U.S. Pat. Nos. 4,880,635; 4,906,477; 4,911,928; 4,917,951; 4,920,016; and 4,921,757; each of which is incorporated herein by reference.

[0573] The pharmaceutical composition described herein may be administered or packaged as a unit dose, for example. The term “unit dose” when used in reference to a pharmaceutical composition of the present disclosure refers to physically discrete units suitable as unitary dosage for the subject, each unit containing a predetermined quantity of active material calculated to produce the desired therapeutic effect in association with the required diluent; i.e., carrier, or vehicle.

[0574] Further, the pharmaceutical composition can be provided as a pharmaceutical kit comprising (a) a container containing a compound of the invention in lyophilized form and (b) a second container containing a pharmaceutically acceptable diluent (e.g., sterile water) for injection. The pharmaceutically acceptable diluent can be used for reconstitution or dilution of the lyophilized compound of the invention. Optionally associated with such container(s) can be a notice in the form prescribed by a governmental agency regulating the manufacture, use or sale of pharmaceuticals or biological products, which notice reflects approval by the agency of manufacture, use or sale for human administration.

[0575] In another aspect, an article of manufacture containing materials useful for the treatment of the diseases described above is included. In some embodiments, the article of manufacture comprises a container and a label. Suitable containers include, for example, bottles, vials, syringes, and test tubes. The containers may be formed from a variety of materials such as glass or plastic. In some embodiments, the container holds a composition that is effective for treating a disease described herein and may have a sterile access port. For example, the container may be an intravenous solution bag or a vial having a stopper pierceable by a hypodermic injection needle. The active agent in the composition is a compound of the invention. In some embodiments, the label on or associated with the container indicates that the composition is used for treating the disease of choice. The article of manufacture may further comprise a second container comprising a pharmaceutically-acceptable buffer, such as phosphate-buffered saline, Ringer's solution, or dextrose solution. It may further include other materials desirable from a commercial and user standpoint, including other buffers, diluents, filters, needles, syringes, and package inserts with instructions for use.

### Delivery Methods

[0576] In another aspect, the present disclosure provides for the delivery of base editors in vitro and in vivo using various strategies, including on separate vectors using split inteins and as well as direct delivery strategies of the ribonucleoprotein complex (i.e., the base editor complexed to the gRNA and/or the second-site gRNA) using techniques such as electroporation, use of cationic lipid-mediated formulations, and induced endocytosis methods using receptor ligands fused to the ribonucleoprotein complexes. In addition, mRNA delivery methods may also be employed. Any such methods are contemplated herein.

[0577] In some aspects, the invention provides methods comprising delivering one or more base editor-encoding and/or gRNA-encoding polynucleotides, such as or one or more vectors as described herein encoding one or more components described herein, one or more transcripts thereof, and/or one or proteins transcribed therefrom, to a host cell. In some aspects, the invention further provides cells produced by such methods, and organisms (such as animals, plants, or fungi) comprising or produced from such cells. In some embodiments, a base editor as described herein in combination with (and optionally complexed with) a guide sequence is delivered to a cell. Conventional viral and non-viral based gene transfer methods can be used to introduce nucleic acids in mammalian cells or target tissues. Such methods can be used to administer nucleic acids encoding components of a base editor to cells in culture, or in a host organism. Non-viral vector delivery systems include DNA plasmids, RNA (e.g. a transcript of a vector described herein), naked nucleic acid, and nucleic acid complexed with a delivery vehicle, such as a liposome. Viral vector delivery systems include DNA and RNA viruses, which have either episomal or integrated genomes after delivery to the cell. For a review of gene therapy procedures, see Anderson, Science 256:808-813 (1992); Nabel & Felgner, TIBTECH 11:211-217 (1993); Mitani & Caskey, TIBTECH 11:162-166 (1993); Dillon, TIBTECH 11:167-175 (1993); Miller, Nature 357:455-460 (1992); Van Brunt, Biotechnology 6(10):1149-1154 (1988); Vigne, Restorative Neurology and Neuroscience 8:35-36 (1995); Kremer & Perricaudet, British Medical Bulletin 51(1):31-44 (1995); Haddada et al., in Current Topics in Microbiology and Immunology Doerfler and Bihm (eds) (1995); and Yu et al., Gene Therapy 1:13-26 (1994).

[0578] Methods of non-viral delivery of nucleic acids include lipofection, nucleofection, microinjection, biolistics, virosomes, liposomes, immunoliposomes, polycation or lipid:nucleic acid conjugates, naked DNA, artificial virions, and agent-enhanced uptake of DNA. Lipofection is described in e.g., U.S. Pat. Nos. 5,049,386, 4,946,787; and 4,897,355) and lipofection reagents are sold commercially (e.g., Transfectam™ and Lipofectin™) Cationic and neutral lipids that are suitable for efficient receptor-recognition lipofection of polynucleotides include those of Feigner, WO 91/17424; WO 91/16024. Delivery can be to cells (e.g. in vitro or ex vivo administration) or target tissues (e.g. in vivo administration). The preparation of lipid:nucleic acid complexes, including targeted liposomes such as immunolipid complexes, is well known to one of skill in the art (see, e.g., Crystal, Science 270:404-410 (1995); Blaese et al., Cancer Gene Ther. 2:291-297 (1995); Behr et al., Bioconjugate Chem. 5:382-389 (1994); Remy et al., Bioconjugate Chem. 5:647-654 (1994); Gao et al., Gene Therapy 2:710-722 (1995); Ahmad et al., Cancer Res. 52:4817-4820 (1992); U.S. Pat. Nos. 4,186,183, 4,217,344, 4,235,871, 4,261,975, 4,485,054, 4,501,728, 4,774,085, 4,837,028, and 4,946,787).

[0579] The use of RNA or DNA viral based systems for the delivery of nucleic acids take advantage of highly evolved processes for targeting a virus to specific cells in the body and trafficking the viral payload to the nucleus. Viral vectors can be administered directly to patients (in vivo) or they can be used to treat cells in vitro, and the modified cells may optionally be administered to patients (ex vivo). Conventional viral based systems could include retroviral, lentivirus, adenoviral, adeno-associated and herpes simplex virus vectors for gene transfer. Integration in the host genome is possible with the retrovirus, lentivirus, and adeno-associated virus gene transfer methods, often resulting in long term expression of the inserted transgene. Additionally, high transduction efficiencies have been observed in many different cell types and target tissues.

[0580] The tropism of a viruses can be altered by incorporating foreign envelope proteins, expanding the potential target population of target cells. Lentiviral vectors are retroviral vectors that are able to transduce or infect non-dividing cells and typically produce high viral titers. Selection of a retroviral gene transfer system would therefore depend on the target tissue. Retroviral vectors are comprised of cis-acting long terminal repeats with packaging capacity for up to 6-10 kb of foreign sequence. The minimum cis-acting LTRs are sufficient for replication and packaging of the vectors, which are then used to integrate the therapeutic gene into the target cell to provide permanent transgene expression. Widely used retroviral vectors include those based upon murine leukemia virus (MuLV), gibbon ape leukemia virus (GaLV), Simian Immuno deficiency virus (SIV), human immuno deficiency virus (HIV), and combinations thereof (see, e.g., Buchscher et al., J. Virol. 66:2731-2739 (1992); Johann et al., J. Virol. 66:1635-1640 (1992); Sommnerfelt et al., Virol. 176:58-59 (1990); Wilson et al., J. Virol. 63:2374-2378 (1989); Miller et al., J. Virol. 65:2220-2224 (1991); PCT/US94/05700). In applications where transient expression is preferred, adenoviral based systems may be used. Adenoviral based vectors are capable of very high transduction efficiency in many cell types and do not require cell division. With such vectors, high titer and levels of expression have been obtained. This vector can be produced in large quantities in a relatively simple system. Adeno-associated virus (“AAV”) vectors may also be used to transduce cells with target nucleic acids, e.g., in the in vitro production of nucleic acids and peptides, and for in vivo and ex vivo gene therapy procedures (see, e.g., West et al., Virology 160:38-47 (1987); U.S. Pat. No. 4,797,368; WO 93/24641; Kotin, Human Gene Therapy 5:793-801 (1994); Muzyczka, J. Clin. Invest. 94:1351 (1994). Construction of recombinant AAV vectors are described in a number of publications, including U.S. Pat. No. 5,173,414; Tratschin et al., Mol. Cell. Biol. 5:3251-3260 (1985); Tratschin, et al., Mol. Cell. Biol. 4:2072-2081 (1984); Hermonat & Muzyczka, PNAS 81:6466-6470 (1984); and Samulski et al., J. Virol. 63:03822-3828 (1989).

[0581] Packaging cells are typically used to form virus particles that are capable of infecting a host cell. Such cells include 293 cells, which package adenovirus, and ψ2 cells or PA317 cells, which package retrovirus. Viral vectors used in gene therapy are usually generated by producing a cell line that packages a nucleic acid vector into a viral particle. The vectors typically contain the minimal viral sequences required for packaging and subsequent integration into a host, other viral sequences being replaced by an expression cassette for the polynucleotide(s) to be expressed. The missing viral functions are typically supplied in trans by the packaging cell line. For example, AAV vectors used in gene therapy typically only possess ITR sequences from the AAV genome which are required for packaging and integration into the host genome. Viral DNA is packaged in a cell line, which contains a helper plasmid encoding the other AAV genes, namely rep and cap, but lacking ITR sequences. The cell line may also be infected with adenovirus as a helper. The helper virus promotes replication of the AAV vector and expression of AAV genes from the helper plasmid. The helper plasmid is not packaged in significant amounts due to a lack of ITR sequences. Contamination with adenovirus can be reduced by, e.g., heat treatment to which adenovirus is more sensitive than AAV. Additional methods for the delivery of nucleic acids to cells are known to those skilled in the art. See, for example, US20030087817, incorporated herein by reference.

[0582] In various embodiments, the base editor constructs (including, the split-constructs) may be engineered for delivery in one or more rAAV vectors. An rAAV as related to any of the methods and compositions provided herein may be of any serotype including any derivative or pseudotype (e.g., 1, 2, 3, 4, 5, 6, 7, 8, 9, 10, 11, 12, 13, 2/1, 2/5, 2/8, 2/9, 3/1, 3/5, 3/8, or 3/9). An rAAV may comprise a genetic load (i.e., a recombinant nucleic acid vector that expresses a gene of interest, such as a whole or split base editor fusion protein that is carried by the rAAV into a cell) that is to be delivered to a cell. An rAAV may be chimeric.

[0583] As used herein, the serotype of an rAAV refers to the serotype of the capsid proteins of the recombinant virus. Non-limiting examples of derivatives and pseudotypes include rAAV2/1, rAAV2/5, rAAV2/8, rAAV2/9, AAV2-AAV3 hybrid, AAVrh.10, AAVhu.14, AAV3a/3b, AAVrh32.33, AAV-HSC15, AAV-HSC17, AAVhu.37, AAVrh.8, CHt-P6, AAV2.5, AAV6.2, AAV2i8, AAV-HSC15/17, AAVM41, AAV9.45, AAV6(Y445F/Y731F), AAV2.5T, AAV-HAE1/2, AAV clone 32/83, AAVShH10, AAV2 (Y->F), AAV8 (Y733F), AAV2.15, AAV2.4, AAVM41, and AAVr3.45. A non-limiting example of derivatives and pseudotypes that have chimeric VP1 proteins is rAAV2/5-1VP1u, which has the genome of AAV2, capsid backbone of AAVS and VP1u of AAV1. Other non-limiting example of derivatives and pseudotypes that have chimeric VP1 proteins are rAAV2/5-8VP1u, rAAV2/9-1VP1u, and rAAV2/9-8VP1u.

[0584] AAV derivatives/pseudotypes, and methods of producing such derivatives/pseudotypes are known in the art (see, e.g., Mol Ther. 2012 April; 20(4):699-708. doi: 10.1038/mt.2011.287. Epub 2012 Jan. 24. The AAV vector toolkit: poised at the clinical crossroads. Asokan A1, Schaffer D V, Samulski R J.). Methods for producing and using pseudotyped rAAV vectors are known in the art (see, e.g., Duan et al., J. Virol., 75:7662-7671, 2001; Halbert et al., J. Virol., 74:1524-1532, 2000; Zolotukhin et al., Methods, 28:158-167, 2002; and Auricchio et al., Hum. Molec. Genet., 10:3075-3081, 2001).

[0585] Methods of making or packaging rAAV particles are known in the art and reagents are commercially available (see, e.g., Zolotukhin et al. Production and purification of serotype 1, 2, and 5 recombinant adeno-associated viral vectors. Methods 28 (2002) 158-167; and U.S. Patent Publication Numbers US20070015238 and US20120322861, which are incorporated herein by reference; and plasmids and kits available from ATCC and Cell Biolabs, Inc.). For example, a plasmid comprising a gene of interest may be combined with one or more helper plasmids, e.g., that contain a rep gene (e.g., encoding Rep78, Rep68, Rep52 and Rep40) and a cap gene (encoding VP1, VP2, and VP3, including a modified VP2 region as described herein), and transfected into a recombinant cells such that the rAAV particle can be packaged and subsequently purified.

[0586] Recombinant AAV may comprise a nucleic acid vector, which may comprise at a minimum: (a) one or more heterologous nucleic acid regions comprising a sequence encoding a protein or polypeptide of interest or an RNA of interest (e.g., a siRNA or microRNA), and (b) one or more regions comprising inverted terminal repeat (ITR) sequences (e.g., wild-type ITR sequences or engineered ITR sequences) flanking the one or more nucleic acid regions (e.g., heterologous nucleic acid regions). Herein, heterologous nucleic acid regions comprising a sequence encoding a protein of interest or RNA of interest are referred to as genes of interest.

[0587] Any one of the rAAV particles provided herein may have capsid proteins that have amino acids of different serotypes outside of the VP1u region. In some embodiments, the serotype of the backbone of the VP1 protein is different from the serotype of the ITRs and/or the Rep gene. In some embodiments, the serotype of the backbone of the VP1 capsid protein of a particle is the same as the serotype of the ITRs. In some embodiments, the serotype of the backbone of the VP1 capsid protein of a particle is the same as the serotype of the Rep gene. In some embodiments, capsid proteins of rAAV particles comprise amino acid mutations that result in improved transduction efficiency.

[0588] In some embodiments, the nucleic acid vector comprises one or more regions comprising a sequence that facilitates expression of the nucleic acid (e.g., the heterologous nucleic acid), e.g., expression control sequences operatively linked to the nucleic acid. Numerous such sequences are known in the art. Non-limiting examples of expression control sequences include promoters, insulators, silencers, response elements, introns, enhancers, initiation sites, termination signals, and poly(A) tails. Any combination of such control sequences is contemplated herein (e.g., a promoter and an enhancer).

[0589] Final AAV constructs may incorporate a sequence encoding the gRNA. In other embodiments, the AAV constructs may incorporate a sequence encoding the second-site nicking guide RNA. In still other embodiments, the AAV constructs may incorporate a sequence encoding the second-site nicking guide RNA and a sequence encoding the gRNA.

[0590] In various embodiments, the gRNAs can be expressed from an appropriate promoter, such as a human U6 (hU6) promoter, a mouse U6 (mU6) promoter, or other appropriate promoter. The gRNAs (if multiple) can be driven by the same promoters or different promoters.

[0591] In some embodiments, a rAAV constructs or the herein compositions are administered to a subject enterally. In some embodiments, a rAAV constructs or the herein compositions are administered to the subject parenterally. In some embodiments, a rAAV particle or the herein compositions are administered to a subject subcutaneously, intraocularly, intravitreally, subretinally, intravenously (IV), intracerebro-ventricularly, intramuscularly, intrathecally (IT), intracisternally, intraperitoneally, via inhalation, topically, or by direct injection to one or more cells, tissues, or organs. In some embodiments, a rAAV particle or the herein compositions are administered to the subject by injection into the hepatic artery or portal vein.

[0592] In other aspects, the base editors can be divided at a split site and provided as two halves of a whole/complete base editor. The two halves can be delivered to cells (e.g., as expressed proteins or on separate expression vectors) and once in contact inside the cell, the two halves form the complete base editor through the self-splicing action of the inteins on each base editor half. Split intein sequences can be engineered into each of the halves of the encoded base editor to facilitate their transplicing inside the cell and the concomitant restoration of the complete, functioning base editor.

[0593] These split intein-based methods overcome several barriers to in vivo delivery. For example, the DNA encoding base editors is larger than the rAAV packaging limit, and so requires special solutions. One such solution is formulating the editor fused to split intein pairs that are packaged into two separate rAAV particles that, when co-delivered to a cell, reconstitute the functional editor protein.

[0594] In this aspect, the base editors can be divided at a split site and provided as two halves of a whole/complete base editor. The two halves can be delivered to cells (e.g., as expressed proteins or on separate expression vectors) and once in contact inside the cell, the two halves form the complete base editor through the self-splicing action of the inteins on each base editor half. Split intein sequences can be engineered into each of the halves of the encoded base editor to facilitate their transplicing inside the cell and the concomitant restoration of the complete, functioning base editor.

[0595] In various embodiments, the base editors may be engineered as two half proteins (i.e., a ABE N-terminal half and a CBE C-terminal half) by “splitting” the whole base editor as a “split site.” The “split site” refers to the location of insertion of split intein sequences (i.e., the N intein and the C intein) between two adjacent amino acid residues in the base editor. More specifically, the “split site” refers to the location of dividing the whole base editor into two separate halves, wherein in each halve is fused at the split site to either the N intein or the C intein motifs. The split site can be at any suitable location in the base editor fusion protein, but preferably the split site is located at a position that allows for the formation of two half proteins which are appropriately sized for delivery (e.g., by expression vector) and wherein the inteins, which are fused to each half protein at the split site termini, are available to sufficiently interact with one another when one half protein contacts the other half protein inside the cell.

[0596] In some embodiments, the split site is located in the napDNAbp domain. In other embodiments, the split site is located in the deaminase domain. In other embodiments, the split site is located in a linker that joins the napDNAbp domain and the deaminase domain.

[0597] In various embodiments, split site design requires finding sites to split and insert an N- and C-terminal intein that are both structurally permissive for purposes of packaging the two half base editor domains into two different AAV genomes. Additionally, intein residues necessary for trans splicing can be incorporated by mutating residues at the N terminus of the C terminal extein or inserting residues that will leave an intein “scar.”

[0598] In various embodiments, using SpCas9 nickase (SEQ ID NO: 1) as an example, the split can be between any two amino acids between 1 and 1368. Preferred splits, however, will be located between the central region of the protein, e.g., from amino acids 50-1250, or from 100-1200, or from 150-1150, or from 200-1100, or from 250-1050, or from 300-1000, or from 350-950, or from 400-900, or from 450-850, or from 500-800, or from 550-750, or from 600-700 of SEQ ID NO: 1. In specific exemplary embodiments, the split site may be between 740/741, or 801/802, or 1010/1011, or 1041/1042. In other embodiments the split site may be between 1/2, 2/3, 3/4, 4/5, 5/6, 6/7, 7/8, 8/9, 9/10, 10/11, 12/13, 14/15, 15/16, 17/18, 19/20 . . . 50/51 . . . 100/101 . . . 200/201 . . . 300/301 . . . 400/401 . . . 500/501 . . . 600/601 . . . .

[0599] 700/701 . . . 800/801 . . . 900/901 . . . 1000/1001 . . . 1100/1101 . . . 1200/1201 . . . 1300/1301 . . . and 1367/1368, including all adjacent pairs of amino acid residues.

[0600] In various embodiments, the split inteins can be used to separately deliver separate portions of a complete Base editor fusion protein to a cell, which upon expression in a cell, become reconstituted as a complete Base editor fusion protein through the trans splicing.

[0601] In some embodiments, the disclosure provides a method of delivering a Base editor fusion protein to a cell, comprising: constructing a first expression vector encoding an N-terminal fragment of the Base editor fusion protein fused to a first split intein sequence; constructing a second expression vector encoding a C-terminal fragment of the Base editor fusion protein fused to a second split intein sequence; delivering the first and second expression vectors to a cell, wherein the N-terminal and C-terminal fragment are reconstituted as the Base editor fusion protein in the cell as a result of trans splicing activity causing self-excision of the first and second split intein sequences.

[0602] In other embodiments, the split site is in the napDNAbp domain.

[0603] In still other embodiments, the split site is in the deaminase domain.

[0604] In yet other embodiments, the split site is in the linker.

[0605] In other embodiments, the base editors may be delivered by ribonucleoprotein complexes.

[0606] In this aspect, the base editors may be delivered by non-viral delivery strategies involving delivery of a base editor complexed with a gRNA (i.e., a ABE ribonucleoprotein complex) by various methods, including electroporation and lipid nanoparticles. Methods of non-viral delivery of nucleic acids include lipofection, nucleofection, microinjection, biolistics, virosomes, liposomes, immunoliposomes, polycation or lipid:nucleic acid conjugates, naked DNA, artificial virions, and agent-enhanced uptake of DNA. Lipofection is described in e.g., U.S. Pat. Nos. 5,049,386, 4,946,787; and 4,897,355) and lipofection reagents are sold commercially (e.g., Transfectam™ and Lipofectin™). Cationic and neutral lipids that are suitable for efficient receptor-recognition lipofection of polynucleotides include those of Feigner, WO 91/17424; WO 91/16024. Delivery can be to cells (e.g. in vitro or ex vivo administration) or target tissues (e.g. in vivo administration).

[0607] The preparation of lipid:nucleic acid complexes, including targeted liposomes such as immunolipid complexes, is well known to one of skill in the art (see, e.g., Crystal, Science 270:404-410 (1995); Blaese et al., Cancer Gene Ther. 2:291-297 (1995); Behr et al., Bioconjugate Chem. 5:382-389 (1994); Remy et al., Bioconjugate Chem. 5:647-654 (1994); Gao et al., Gene Therapy 2:710-722 (1995); Ahmad et al., Cancer Res. 52:4817-4820 (1992); U.S. Pat. Nos. 4,186,183, 4,217,344, 4,235,871, 4,261,975, 4,485,054, 4,501,728, 4,774,085, 4,837,028, and 4,946,787).

### Kits, Vectors, Cells

[0608] Some aspects of this disclosure provide kits comprising a nucleic acid construct, comprising (a) a nucleotide sequence encoding a Cas9 domain or a fusion protein comprising a Cas9 domain as provided herein; and (b) a heterologous promoter that drives expression of the sequence of (a). In some embodiments, the kit further comprises an expression construct encoding a guide RNA backbone, wherein the construct comprises a cloning site positioned to allow the cloning of a nucleic acid sequence identical or complementary to a target sequence into the guide RNA backbone.

[0609] Some aspects of this disclosure provide polynucleotides encoding a Cas9 domain or a fusion protein comprising a Cas9 domain as provided herein. Some aspects of this disclosure provide vectors comprising such polynucleotides. In some embodiments, the vector comprises a heterologous promoter driving expression of polynucleotide.

[0610] In one aspect, provided herein are methods comprising contacting a cell with a kit provided herein. In another aspect, provided herein are methods comprising contacting a cell with a vector provided herein. In some embodiments, the vector is transfected into the cell. In some embodiments, the vector is transfected into the cell using a suitable transfection reaction. Transfection reactions may be carried out, for example, using electroporation, heat shock, or a composition comprising a cationic lipid. Cationic lipids suitable for the transfection of nucleic acid molecules are provided in, for example, Patent Publication WO2015/035136, published Mar. 12, 2015, entitled “Delivery System for Functional Nucleases”; the entire contents of which is incorporated by reference herein.

[0611] Some aspects of this disclosure provide cells comprising a Cas9 domain, a fusion protein, a nucleic acid molecule, and/or a vector as provided herein.

[0612] The description of exemplary embodiments of the reporter systems (e.g., GFP) herein is provided for illustration purposes only and not meant to be limiting. Additional reporter systems, e.g., variations of the exemplary systems described in detail above, are also embraced by this disclosure.

### EXAMPLES

[0613] The applicability of base editing is largely determined by the PAM requirement of the nucleic acid programmable DNA binding domain (e.g., Cas9 domain) and by the location of the base editing activity window within the target protospacer. Described in this Example is a panel of five optimized adenine base editors (ABEmax variants) compatible with non-NGG PAMs, as well as five pairs of cytosine and adenine base editors that use circularly permuted Cas9 variants to enlarge the width of the base editing window and reduce editing byproducts. These new base editors expand the targeting scope and utility of base editors, such as cytosine and adenine base editors.

### Introduction

[0614] Base editing requires that the target sequence satisfy the protospacer adjacent motif requirement of the Cas9 domain and that the target nucleotide be located within the editing window of the base editor. To increase the targeting scope of base editors, six optimized adenine base editors (ABEmax variants) were engineered, that use SpCas9 variants compatible with non-NGG protospacer adjacent motifs. To increase the range of target bases that can be modified within the protospacer, circularly permuted Cas9 variants were used to produce four cytosine and four adenine base editors with an editing window expanded from ˜4-5 nucleotides to up to ˜8-9 nucleotides and reduced byproduct formation. This set of base editors improves the targeting scope of cytosine and adenine base editing.

[0615] Base editing enables the programmable conversion of one base pair to another without making double-stranded DNA breaks,¹⁻⁵ and has already been widely used to install or correct point mutations in a wide range of organisms.^{6,7} Two classes of base editors were developed: cytosine base editors (CBEs) convert C⋅G to T⋅A8-10, while adenine base editors (ABEs) convert A⋅T to G⋅C.^{11,12} Together, CBEs and ABEs enable the installation or correction of all four transition mutations, collectively accounting for ˜63% of pathogenic human point mutations.^{13,14} Because base editors do not make double-stranded DNA breaks, they minimize the formation of editing byproducts such as insertions, deletions, translocations or DNA rearrangements.¹⁵⁻¹⁷

[0616] Since base editors use a catalytically impaired Cas9 to recognize the target DNA site, they canonically require that the target site contain a protospacer adjacent motif (PAM) ˜15±2 nucleotides from the target base. CBE variants that use Cas9 homologs with different PAM requirements increase the likelihood that a target site supports cytosine base editing^{5,10,18,19}. In contrast, far fewer ABE variants with distinct PAMs have been described.²⁰⁻²²

[0617] Both CBEs and ABEs mutate target base pairs within a small (typically ˜4-5-nucleotide) window within the protospacer. The width of this editing window, together with PAM availability, defines the targeting scope of base editing. In some cases, the target base is located outside of the base-editing window relative to an available PAM. Moreover, for applications such as mutagenizing a gene, disrupting genes by introducing premature stop codons or abrogating splice sites or regulatory sequences, a wider editing window is desirable.

[0618] Here, current-generation ABEmax²³ variants are introduced, that are optimized for mammalian cell use on target sites with non-NGG PAMs. CBEs and ABEs are also reported, that use circularly permuted SpCas9 (CP-Cas9) variants to expand the base-editing window from ˜4-5 nucleotides to up to ˜8-9 nucleotides. The resulting CP-CBEmax variants exhibit higher product purities, in addition to expanded editing windows, while CP-ABEmax variants maintain the high product purities typical of ABEs. These CBE and ABE variants expand the targeting scope of base editing.

### Results

[0619] The compatibility of CBEs with CRISPR proteins that recognize PAMs other than NGG, have been reported, thereby expanding their targeting scope. These variants included evolved Streptococcus pyogenes Cas9 variants SpCas9-VQR/SpCas9-VRQR (PAM: NGA)^{24,25}, SpCas9-VRER (PAM: NGCG)²⁴, xCas9 (PAM:NGN),¹⁹ SpCas9-NG (PAM: NG)²⁶; Staphylococcus aureus Cas9 (SaCas9, PAM: NNGRRT)^{27,28} and its modified variant KKH (PAM: NNNRRT);²⁹ and Lachnospiraceae bacterium Cas 12a (LbaCpf1, PAM: TTTV where V=A, C or G).^{18,30} Following the development of ABE, it was hypothesized that the evolved TadA deoxyadenosine deaminase domain might be similarly compatible with other CRISPR proteins. Indeed, Yang et al. and Hua et al. recently used mouse and plant versions of VQR-ABE, VRER-ABE, SaCas9-ABE and SaKKH-ABE to perform base editing in mouse embryos and rice, respectively.²⁰⁻²²

[0620] Optimization of both codon usage and nuclear localization in both CBEs and ABEs, resulting in BE4max (referred to hereafter as CBEmax) and ABEmax, respectively, greatly enhances base-editing activity in mammalian cells.^{23,31} These current-generation CBE and ABE forms were used for all base editors constructed in this study. First, ABEmax variants were created that replace the SpCas9 nickase component with two engineered SpCas9 variants with altered PAM specificities: VRQR-SpCas9 (PAM: NGA) and VRER-SpCas9 (PAM: NGCG) (FIG. 1A), yielding VRQR-ABEmax and VRER-ABEmax, respectively. Base-editing activity was then evaluated at six endogenous human genomic loci for each PAM in human HEK293T cells.

[0621] Across six endogenous NGA PAM-containing sites low editing efficiency with ABEmax was observed, averaging 11±2.1% A⋅T-to-G⋅C conversion (mean±s.d. of 3 biological replicates at 6 genomic sites, reporting the target A with the highest conversion frequency). In contrast, VRQR-ABEmax resulted in 35±4.6% A⋅T-to-G⋅C conversion across the same six genomic sites, a 3.2-fold average improvement (FIG. 1B). VRQR-ABEmax activity was also compared with that of ABEmax variants that use either xCas9¹⁹ or the recently reported SpCas9-NG²⁶, both of which are active on some NGN PAM sites (xABEmax and NG-ABEmax, respectively). The average editing activity of xABEmax was 2.7-fold lower than that of VRQR-ABEmax (FIG. 1B). NG-ABEmax exhibited comparable activity to VRQR-ABEmax at some sites, but overall lower activity than VRQR-ABEmax with an average of 24±3.9% A⋅T-to-G⋅C conversion at these six genomic sites. Thus, VRQR-SpCas9, engineered specifically to recognize NGA PAM sites^{24,25}, supports more efficient editing at these sites than other evolved Cas9 variants.

[0622] At the six tested endogenous genomic sites containing NGCG PAMs, minimal activity from ABEmax and xABE-max was observed in HEK293T cells (FIG. 1C). VRER-ABEmax, however, greatly improved A⋅T-to-G⋅C conversion efficiencies at all tested sites, averaging 40±3.6% conversion, a 7.0-fold improvement over ABEmax. Because the VRQR variant differs from the VQR variant (which functions on both NGA and NGCG PAMs²⁴) only by the addition of the G1218R mutation, which is also present in VRER-SpCas9, it was suspected that VRQR retains activity on NGCG PAMs. Indeed, VRQR-ABEmax exhibited a further 1.3-fold improvement in editing efficiencies (averaging 50±3.6% A⋅T-to-G⋅C conversion) at the same six NGCG PAM sites compared with VRER-ABEmax (FIG. 1C). NG-ABEmax performed equally well on the six NGCG PAM-containing genomic sites as VRQR-ABEmax, averaging 51±5.9% A⋅T-to-G⋅C conversion. VRER-ABEmax, VRQR-ABEmax and NG-ABEmax did not exhibit substantial indel formation or an apparent shift in the base-editing window (FIG. 1D and FIGS. 3A-3C).

[0623] Next, the base-editing activity of VRQR-ABEmax and NG-ABEmax was evaluated on three genomic sites that were previously shown to be edited by xABE¹⁹ containing PAMs other than NGA or NGCG. Of the three sites tested (with GAT and two NGCC PAMs), VRQR-ABEmax exhibited an average of 2.3-fold greater A⋅T-to-G⋅C conversion activity on both NGCC PAM sites, but 2.6-fold lower activity on a GAT PAM site, compared with xABEmax FIG. 1E). NG-ABEmax exhibited a 1.5-fold greater A⋅T-to-G⋅C conversion activity on both NGCC PAM sites and a 1.7-fold greater activity on the GAT PAM site. These data indicate that the VRQR-, VRER- and SpCas9-NG variants are compatible with the ABEmax architecture and retain base-editing activity at sites containing their cognate non-NGG PAMs. In most cases, VRQR-ABEmax tends to outperform other reported SpCas9 variants on sites containing either NGCG or NGA PAMs, and at some sites with NGCC PAMs. For alternative PAMs, such as the GAT PAM site examined in this study, xABE-max or base editors derived from Cas9-NG²⁶ are preferred. Taken together, these results indicate that targets lacking NGG PAMs can be accessed by multiple evolved or engineered Cas9 variants, and that the optimal base editor may vary on a site-by-site basis.

[0624] To further expand the targeting scope of ABE, it was examined whether SaCas9 is compatible with the ABEmax architecture. SaCas9 naturally targets NNGRRT PAMs²⁷, and an evolved variant, SaKKH, recognizes NNNRRT PAMs²⁹. Both SaCas9 and SaKKH-ABEmax variants were generated and tested on six endogenous NNGRRT PAM sites and six endogenous NNHRRT PAM sites in HEK293T cells.

[0625] Observed A⋅T-to-G⋅C conversion activity varied substantially from site to site, but averaged 22±2.3% and 26±5.7% A⋅T-to-G⋅C conversion for SaABEmax on six NNGRRT PAM sites and SaKKH-ABEmax on six NNHRRT sites, respectively, with minimal indels (FIGS. 1F, 1G and FIGS. 4A-4B). SaABEmax was unable to efficiently target the six NNHRRT PAM sites (FIG. 1G). However, the editing efficiency of SaABEmax was slightly higher than that of SaKKH-ABEmax on NNGRRT sites (22±2.3% versus 15±2.8%). The moderate editing efficiencies of SaABEmax and SaKKH-ABEmax contrast with the high activities of SaCas9-derived CBEs,¹⁰ which generally edit more efficiently than the corresponding SpCas9 CBE. These results suggest that further engineering or evolution may benefit targeting ABE with SaCas9 derivatives.

[0626] Consistent with previous observations of SaCas9-derived CBEs¹⁰, SaABEmax and SaKKH-ABEmax exhibited an expanded base-editing activity window from protospacer positions 4-14 (numbering the PAM as positions 21-26). Maximum editing typically occurred around positions 7-11, with the most frequent outcome being a single A⋅T-to-G⋅C edit within this window (FIG. 1H and FIGS. 4A-4B). Although an expanded window increases the likelihood of bystander base editing (the editing of non-target adenines within the activity window), a larger window is useful when target adenines would otherwise be inaccessible due to the lack of a PAM, when bystander editing is not consequential, when undesired genotypes can be removed by screening, or when broad mutagenesis is desired.

[0627] Given the potential utility of base editors with shifted or expanded activity windows³², it was next sought to engineer base editor architectures that enable editing at different protospacer positions. The activity window of base editors in mammalian cells has proven surprisingly difficult to broaden, with multimeric deaminase assembly³³ and linker variation³¹ for CBEs and extended guide RNAs for ABEs³⁴ representing the only window-broadening strategies reported to date. Oakes and coworkers recently generated CP-SpCas9 variants that retain both binding and DNA cleavage activity³⁵. For several active SpCas9 circular permutants, the CP termini are predicted to lie closer to the single-stranded DNA (ssDNA) loop that is the substrate for base editing than the original SpCas9 termini (FIG. 2A).³⁶ It was hypothesized that these circular permutants might provide the deaminase domains in CBEs and ABEs greater access to the ssDNA loop, resulting in expanded or otherwise altered activity windows.

[0628] Five SpCas9 circular permutants (CP1012, CP1028, CP1041, CP1249 and CP1300, in which the number identifies the amino acid that serves as the new N terminus) were chosen based on both retention of DNA binding activity and predicted proximity to the ssDNA loop.³⁵ Five CP-CBEmax and five CP-ABEmax variants were generated by fusing the CP-Cas9 nickase variants in bis-bpNLS and codon-optimized forms (FIGS. 2A, 2B).

[0629] The resulting CP-CBEmax and CP-ABEmax variants were transfected into HEK293T cells and tested for base-editing activity at five endogenous genomic sites containing adenines and cytosines throughout the target 20-nt protospacer (FIGS. 2C, 2F). Genomic loci were chosen for which target bases were mostly located outside of the canonical editing window of positions 4-8 to more precisely define the editing window of these CP base editors. Four of the five CP-CBE variants were capable of base editing at all five sites without substantial indel formation (generally <2%) (FIG. 2C and FIGS. 5A-5B), while CP1300-CBEmax demonstrated highly site-dependent base-editing activity (FIGS. 6A-6B). Three of the remaining four CP-CBEmax variants exhibited efficient editing activity, averaging 47±3.6%, 46±4.9%, 18±5.6% and 42±4.6% CG-to-TA conversion for CP1012-CBEmax, CP1028-CBEmax, CP1041-CBEmax and CP1249-CBEmax, respectively, compared with 66±5.9% CG-to-TA conversion for CBEmax at the same genomic sites. Two of the variants, CP1012-CBEmax and CP1028-CBEmax, showed broadening of the editing window from the canonical positions 4-8 to positions 4-11 of the protospacer, averaging 12±1.6% and 15±3.9% CG-to-TA conversion at positions 9-11, respectively, compared with 5.8±2.2% for CBEmax at these positions (FIGS. 2C, 2E). These results together establish that CP-CBEmax variants indeed exhibit broadened editing windows.

[0630] Surprisingly, at three of the five genomic sites tested with CP-CBEmax variants, CP1012-CBEmax, CP1028-CBEmax and CP1041-CBEmax also edited bases upstream of the protospacer on both the target strand (the strand normally targeted for nucleobase deamination) and the non-target strand. This out-of-protospacer editing was particularly evident for CP1012-CBEmax, with editing observed as far upstream as the ˜13 position of the target strand (FIG. 7). These upstream editing events may arise from extended R-loop formation by some circular permutants at sites prone to unwinding, creating larger accessible ssDNA regions.

[0631] As previously reported,^{1,8} CBEs can generate both desired C-to-T edits and unanticipated C-to-G and C-to-A mutations resulting from error-prone base excision repair of the uracil intermediate. Among the five genomic sites tested, three sites when treated with CBEmax resulted in <1% non-C-to-T byproducts, but two sites unusually prone to unanticipated editing by-products showed an average of 19±3.3% non-C-to-T byproducts among CBEmax-edited products. Surprisingly, CP1012-CBEmax, CP1028-CBEmax, CP1041-CBEmax and CP1249-CBEmax demonstrated greatly reduced (2.1-19-fold lower than CBEmax) byproduct formation at these two problematic sites (FIG. 2G and FIGS. 11A-11B). The improved product purity of CP-CBEmax variants might result from the newly positioned termini of Cas9 allowing the C-terminal UGI (or a UGI⋅UNG complex) to better impede uracil excision by UNG. Consistent with this model, the minimum linear distance between the predicted location of the C termini and the ssDNA target in two different SpCas9 crystal structures^{36,37} is inversely related to observed product purity (decreasing distance and increasing product purities: CBEmax, CP1249-CBEmax, CP1012-CBEmax, CP1028-CBEmax, CP1041-CBEmax) (FIGS. 8A-8B).

[0632] To probe the relationship between product purity and UGI positioning, CP-CBEmax base editors were generated without UGI, denoted CP-CBEmax-B variants. At one of the genomic sites prone to product mixtures, CP-CBEmax-B variants no longer showed a correlation between linear distance and product purity (FIG. 9 and FIGS. 11A-11B). This correlation was still evident, however, at the other site, suggesting that factors other than UGI positioning can also govern product purity⁸ on a site-dependent basis. Together, these results reveal that CP-CBEmax variants generate undesired byproducts less frequently than CBEmax, possibly by enhancing access of the UGI domain to the edited site.

[0633] Most CP-ABEmax variants similarly exhibited a broadening of the editing window (FIG. 2D). CP-ABEmax variants retained efficient editing activity similar to that of ABEmax, averaging 45±3.5%, 52±3.9%, 40±5.4% and 51±2.2% A⋅T-to-G⋅C conversion for CP1012-ABEmax, CP1028-ABEmax, CP1041-ABEmax and CP1249-ABEmax, respectively, compared with an average of 54±4.3% A⋅T-to-G⋅C conversion for ABEmax at the same four genomic sites. Both ABEmax and the CP variants generated minimal indels (generally <2%) (FIGS. 5A-5B). While no out-of-protospacer editing was observed among CP-ABEmax variants, the window-broadening effect was pronounced, generally resulting in an expansion from the canonical window of protospacer positions 4-7 for ABEmax to a window spanning positions 4-12 (FIG. 2F). Base-editing efficiencies at protospacer positions 8-12 averaged 20±1.9%, 18±2.2%, 24±4.0% and 23±2.3% A⋅T-to-G⋅C conversion for CP1012-ABEmax, CP1028-ABEmax, CP1041-ABEmax and CP1249-ABEmax, respectively, a 6.4- to 8.6-fold increase over that of ABEmax at these distal protospacer positions. Intriguingly, CP1012-ABEmax also exhibited a shifted (rather than broadened) base-editing window, with maximal editing taking place at A6 or A7, compared with A5 or A6 for ABEmax (FIG. 2F). CP1041-ABEmax showed the broadest editing window, with up to 11±3.3% average editing at position 14 of the protospacer (FIG. 2F). CP-ABEmax variants thus are able to edit target As that lie outside of the canonical ABE editing window.

[0634] To assess possible effects of circular permutation on off-target base editing, off-target editing of all ten CP-CBEmax and CP-ABEmax variants was measured at nine genomic off-target sites previously identified by genome-wide unbiased identifications of DSBs evaluated by sequencing (GUIDE-seq) as the most highly edited off-target substrates of SpCas9 nuclease for three target loci.³⁸ Off-target base-editing efficiency of CP base editors was similar to or less than that of CBEmax or ABEmax for C or A nucleotides within the canonical editing window. As expected, for C or A nucleotides outside of the canonical editing window, the expanded editing windows of CP base editors in some cases allowed higher off-target editing than CBEmax or ABEmax (FIGS. 12-17).

[0635] Together, these results demonstrate that circularly permuting the Cas9 nickase domain of base editors results in CBEmax and ABEmax variants with broadened or shifted editing windows. These altered targeting properties enable efforts to perform base editing at currently inaccessible target nucleotides, and can also substantially improve product purity. Indeed, an analysis of human pathogenic single nucleotide polymorphisms (SNPs) in ClinVar^{17,18} reflects a substantial improvement in the fraction of targetable SNPs when considering the expanded CP-CBEmax or CP-ABEmax editing windows (51% of SNPs correctable by A⋅T-to-G⋅C conversion or 51% of SNPs correctable by C⋅G-to-T⋅A conversion, respectively) compared with their unpermuted CBEmax and ABEmax counterparts (27% and 31%, respectively) (FIG. 10B). Alternative-PAM ABEmax variants and CP-CBEmax and ABEmax variants thus expand the capabilities of base editors, now widely used in the biomedical research community⁵.

### Methods

### General Methods.

[0636] PCR was performed using Phusion U Green Multiplex PCR Master Mix (ThermoFisher Scientific). All plasmids were assembled by the uracil-specific excision reagent (USER) cloning method as previously described.² The amino acid sequences for codon-optimized, bis-bpNLS base editor variants are listed in FIGS. 18A-18O. Guide RNA plasmids for SpCas9, SaCas9 and all engineered variants were assembled as previously described¹⁰. Sequences of protospacers used in this study are listed in FIG. 19. Plasmids for mammalian cell transfections were prepared using the ZymoPURE Plasmid Midiprep kit (Zymo Research Corporation).

### Cell Culture

[0637] HEK293T cells (ATCC CRL-3216) were cultured in Dulbecco's modified Eagle's medium (Corning) supplemented with 10% fetal bovine serum (ThermoFisher Scientific) and maintained at 37° C. with 5% CO₂.

### Transfections

[0638] HEK293T cells were seeded on 48-well poly-d-lysine plates (Corning) in the same culture medium. Cells were transfected 12-16 hours after plating with 1.5 μl Lipofectamine 2000 (ThermoFisher Scientific) using 750 ng base editor plasmid, 250 ng guide RNA plasmid and 10 ng green fluorescent protein as a transfection control. Cells were cultured for 3 days with media exchanged following the first day, then washed with ×1 PBS (ThermoFisher Scientific), followed by genomic DNA extraction by addition of 100 μl freshly prepared lysis buffer (10 mM Tris-HCl, pH 7.5, 0.05% SDS, 25 μg ml⁻¹ proteinase K (ThermoFisher Scientific)) directly into each transfected well. The mixture was incubated at 37° C. for 1 hour then heat inactivated at 80° C. for 30 minutes. Genomic DNA lysate was subsequently used immediately for high-throughput sequencing (HTS).

[0639] HTS of genomic DNA samples. HTS of genomic DNA from HEK293T cells was performed as previously described². Primers for PCR 1 of target genomic site amplification are listed in FIG. 20. Following Illumina barcoding, PCR products were pooled and purified by electrophoresis with a 2% agarose gel using a Monarch DNA Gel Extraction Kit (NEB), eluting with 30 μl H₂O. DNA concentration was quantified with Qubit dsDNA High Sensitivity Assay Kit (ThermoFisher Scientific) and sequenced on an Illumina MiSeq instrument (paired-end read, R1:250-280 cycles, R2:0 cycles) according to the manufacturer's protocols.

### HTS Data Analysis

[0640] Sequencing reads were demultiplexed using the MiSeq Reporter (Illumina) and fastq files were analyzed using Crispresso2.³⁹ Base-editing values are representative of n=3 independent biological replicates collected over different days by different researchers, with the mean±s.d. shown. Base-editing values are reported as a percentage of the number of reads with cytosine or adenine mutagenesis over the total aligned reads.

### Statistics and Reproducibility

[0641] All statistical analyses were performed on n=3 biologically independent experiments using the unpaired two-tailed Student's t-test. Biologically independent experiments reported here were performed by different researchers using independent splits of the mammalian cell type used. Test values can be found in FIGS. 11A-11B.

### Data Availability

[0642] Plasmids encoding modified PAM adenine base editors and circularly permuted cytosine and adenine base editors have been deposited to Addgene. High-throughput sequencing data are deposited in the NCBI Sequence Read Archive (PRJNA498804).

### Code Availability

[0643] Access to and usage for the custom Crispresso2 script can be found in Supplementary Note 1³⁹. ClinVar analysis of pathogenic human SNPs targetable by the base editors described in this study was executed using a custom Matlab script described previously.^{1,2}

### REFERENCES

[0644] 1. Komor, A. C., Kim, Y. B., Packer, M. S., Zuris, J. A. & Liu, D. R. Programmable editing of a target base in genomic DNA without double-stranded DNA cleavage. Nature 533, 420-424 (2016).
[0645] 2. Gaudelli, N. M. et al. Programmable base editing of A*T to G*C in genomic DNA without DNA cleavage. Nature 551, 464-471 (2017).
[0646] 3. Zong, Y. et al. Precise base editing in rice, wheat and maize with a Cas9-cytidine deaminase fusion. Nat. Biotechnol. 35, 438-440 (2017).
[0647] 4. Zeng, Y. et al. Correction of the Marfan syndrome pathogenic FBN1 mutation by base editing in human cells and heterozygous embryos. Mol. Ther. 26, 2631-2637 (2018).
[0648] 5. Rees, H. A. & Liu, D. R. Base editing: precision chemistry on the genome and transcriptome of living cells. Nat. Rev. Genet. 19, 770-788 (2018).
[0649] 6. Chadwick, A. C., Wang, X. & Musunuru, K. In vivo base editing of PCSK9 (proprotein convertase subtilisin/kexin type 9) as a therapeutic alternative to genome editing. Arterioscler. Thromb. Vasc. Biol. 37, 1741-1747 (2017).
[0650] 7. Villiger, L. et al. Treatment of a metabolic liver disease by in vivo genome base editing in adult mice. Nat. Med. 24, 1519-1525 (2018).
[0651] 8. Komor, A. C. et al. Improved base excision repair inhibition and bacteriophage Mu Gam protein yields C:G-to-T:A base editors with higher efficiency and product purity. Sci. Adv. 3, eaao4774 (2017).
[0652] 9. Rees, H. A. et al. Improving the DNA specificity and applicability of base editing through protein engineering and protein delivery. Nat. Commun. 8, 15790 (2017).
[0653] 10. Kim, Y. B. et al. Increasing the genome-targeting scope and precision of base editing with engineered Cas9-cytidine deaminase fusions. Nat. Biotechnol. 35, 371-376 (2017).
[0654] 11. Yan, F. et al. Highly efficient A T to G C base editing by Cas9n-guided tRNA adenosine deaminase in rice. Mol. Plant 11, 631-634 (2018).
[0655] 12. Kang, B. C. et al. Precision genome engineering through adenine base editing in plants. Nat. Plants 4, 427-431 (2018).
[0656] 13. Landrum, M. J. et al. ClinVar: public archive of interpretations of clinically relevant variants. Nucleic Acids Res. 44, D862—D868 (2016).
[0657] 14. Landrum, M. J. et al. ClinVar: public archive of relationships among sequence variation and human phenotype. Nucleic Acids Res. 42, D980-D985 (2014).
[0658] 15. Kosicki, M., Tomberg, K. & Bradley, A. Repair of double-strand breaks induced by CRISPR-Cas9 leads to large deletions and complex rearrangements. Nat. Biotechnol. 36, 765-771 (2018).
[0659] 16. Haapaniemi, E., Botla, S., Persson, J., Schmierer, B. & Taipale, J. CRISPR-Cas9 genome editing induces a p53-mediated DNA damage response. Nat. Med. 24, 927-930 (2018).
[0660] 17. Ihry, R. J. et al. p53 inhibits CRISPR-Cas9 engineering in human pluripotent stem cells. Nat. Med. 24, 939-946 (2018).
[0661] 18. Li, X. et al. Base editing with a Cpf1-cytidine deaminase fusion. Nat. Biotechnol. 36, 324-327 (2018).
[0662] 19. Hu, J. H. et al. Evolved Cas9 variants with broad PAM compatibility and high DNA specificity. Nature 556, 57-63 (2018).
[0663] 20. Hua, K. et al. Precise A⋅T to G⋅C base editing in the rice genome. Mol. Plant 11, 627-630 (2018).
[0664] 21. Hua, K., Tao, X. & Zhu, J. K. Expanding the base editing scope in rice by using Cas9 variants. Plant Biotechnol. J. 17, 499-504 (2019).
[0665] 22. Yang, L. et al. Increasing targeting scope of adenosine base editors in mouse and rat embryos through fusion of TadA deaminase with Cas9 variants. Protein Cell 9, 814-819 (2018).
[0666] 23. Koblan, L. W. et al. Improving cytidine and adenine base editors by expression optimization and ancestral reconstruction. Nat. Biotechnol. 36, 843-846 (2018).
[0667] 24. Kleinstiver, B. P. et al. Engineered CRISPR-Cas9 nucleases with altered PAM specificities. Nature 523, 481-485 (2015).
[0668] 25. Kleinstiver, B. P. et al. High-fidelity CRISPR-Cas9 nucleases with no detectable genome-wide off-target effects. Nature 529, 490-495 (2016).
[0669] 26. Nishimasu, H. et al. Engineered CRISPR-Cas9 nuclease with expanded targeting space. Science 361, 1259-1262 (2018).
[0670] 27. Ran, F. A. et al. In vivo genome editing using Staphylococcus aureus Cas9. Nature 520, 186-191(2015).
[0671] 28. Gu, T. et al. Highly efficient base editing in Staphylococcus aureus using an engineered CRISPR RNA-guided cytidine deaminase. Chem. Sci. 9, 3248-3253 (2018).
[0672] 29. Kleinstiver, B. P. et al. Broadening the targeting range of Staphylococcus aureus CRISPR-Cas9 by modifying PAM recognition. Nat. Biotechnol. 33, 1293-1298 (2015).
[0673] 30. Zetsche, B. et al. Cpf1 is a single RNA-guided endonuclease of a class 2 CRISPR-Cas system. Cell 163, 759-771 (2015).
[0674] 31. Zafra, M. P. et al. Optimized base editors enable efficient editing in cells, organoids and mice. Nat. Biotechnol. 36, 888-893 (2018).
[0675] 32. Zong, Y. et al. Efficient C-to-T base editing in plants using a fusion of nCas9 and human APOBEC3A. Nat. Biotechnol. 36, 950-953 (2018).
[0676] 33. Jiang, W. et al. BE-PLUS: a new base editing tool with broadened editing window and enhanced fidelity. Cell Res. 28, 855-861 (2018).
[0677] 34. Ryu, S. M. et al. Adenine base editing in mouse embryos and an adult mouse model of Duchenne muscular dystrophy. Nat. Biotechnol. 36, 536-539 (2018).
[0678] 35. Oakes, B. L. et al. Circular permutants as programmable scaffolds for genome modification. Cell 176, 254-267 (2018).
[0679] 36. Jiang, F. et al. Structures of a CRISPR-Cas9 R-loop complex primed for DNA cleavage. Science 351, 867-871(2016).
[0680] 37. Huai, C. et al. Structural insights into DNA cleavage activation of CRISPR-Cas9 system. Nat. Commun. 8, 1375 (2017).
[0681] 38. Tsai, S. Q. et al. GUIDE-seq enables genome-wide profiling of off-target cleavage by CRISPR-Cas nucleases. Nat. Biotechnol. 33, 187-197 (2015).
[0682] 39. Clement, K. et al. CRISPResso2 provides accurate and rapid genome editing sequence analysis. Nat. Biotechnol. 37, 224-226 (2019).

### EQUIVALENTS AND SCOPE

[0683] Those skilled in the art will recognize, or be able to ascertain using no more than routine experimentation, many equivalents of the embodiments described herein. The scope of the present disclosure is not intended to be limited to the above description, but rather is as set forth in the appended claims.

[0684] Articles such as “a,” “an,” and “the” may mean one or more than one unless indicated to the contrary or otherwise evident from the context. Claims or descriptions that include “or” between two or more members of a group are considered satisfied if one, more than one, or all of the group members are present, unless indicated to the contrary or otherwise evident from the context. The disclosure of a group that includes “or” between two or more group members provides embodiments in which exactly one member of the group is present, embodiments in which more than one members of the group are present, and embodiments in which all of the group members are present. For purposes of brevity those embodiments have not been individually spelled out herein, but it will be understood that each of these embodiments is provided herein and may be specifically claimed or disclaimed.

[0685] It is to be understood that the invention encompasses all variations, combinations, and permutations in which one or more limitation, element, clause, or descriptive term, from one or more of the claims or from one or more relevant portion of the description, is introduced into another claim. For example, a claim that is dependent on another claim can be modified to include one or more of the limitations found in any other claim that is dependent on the same base claim. Furthermore, where the claims recite a composition, it is to be understood that methods of making or using the composition according to any of the methods of making or using disclosed herein or according to methods known in the art, if any, are included, unless otherwise indicated or unless it would be evident to one of ordinary skill in the art that a contradiction or inconsistency would arise.

[0686] Where elements are presented as lists, e.g., in Markush group format, it is to be understood that every possible subgroup of the elements is also disclosed, and that any element or subgroup of elements can be removed from the group. It is also noted that the term “comprising” is intended to be open and permits the inclusion of additional elements or steps. It should be understood that, in general, where an embodiment, product, or method is referred to as comprising particular elements, features, or steps, embodiments, products, or methods that consist, or consist essentially of, such elements, features, or steps, are provided as well. For purposes of brevity those embodiments have not been individually spelled out herein, but it will be understood that each of these embodiments is provided herein and may be specifically claimed or disclaimed.

[0687] Where ranges are given, endpoints are included. Furthermore, it is to be understood that unless otherwise indicated or otherwise evident from the context and/or the understanding of one of ordinary skill in the art, values that are expressed as ranges can assume any specific value within the stated ranges in some embodiments, to the tenth of the unit of the lower limit of the range, unless the context clearly dictates otherwise. For purposes of brevity, the values in each range have not been individually spelled out herein, but it will be understood that each of these values is provided herein and may be specifically claimed or disclaimed. It is also to be understood that unless otherwise indicated or otherwise evident from the context and/or the understanding of one of ordinary skill in the art, values expressed as ranges can assume any subrange within the given range, wherein the endpoints of the subrange are expressed to the same degree of accuracy as the tenth of the unit of the lower limit of the range.

[0688] In addition, it is to be understood that any particular embodiment of the present invention may be explicitly excluded from any one or more of the claims. Where ranges are given, any value within the range may explicitly be excluded from any one or more of the claims. Any embodiment, element, feature, application, or aspect of the compositions and/or methods of the invention, can be excluded from any one or more claims. For purposes of brevity, all of the embodiments in which one or more elements, features, purposes, or aspects is excluded are not set forth explicitly herein.

The application's sequence listing, which the Patent Office published only in electronic form, follows.

SEQUENCE LISTING (402 sequences)

SEQ ID NO: 1 - protein, 1368 aa, Streptococcus pyogenes [sequence omitted]

SEQ ID NO: 2 - protein, 1367 aa, Artificial Sequence
  Synthetic
DKKYSIGLAIGTNSVGWAVITDEYKVPSKKFKVLGNTDRHSIKKNLIGALLFDSGETAEATRLKRTARRRYTRRKNRICYLQEIFSNEMAKVDDSFFHRLEESFLVEEDKKHERHPIFGNIVDEVAYHEKYPTIYHLRKKLVDSTDKADLRLIYLALAHMIKFRGHFLIEGDLNPDNSDVDKLFIQLVQTYNQLFEENPINASGVDAKAILSARLSKSRRLENLIAQLPGEKKNGLFGNLIALSLGLTPNFKSNFDLAEDAKLQLSKDTYDDDLDNLLAQIGDQYADLFLAAKNLSDAILLSDILRVNTEITKAPLSASMIKRYDEHHQDLTLLKALVRQQLPEKYKEIFFDQSKNGYAGYIDGGASQEEFYKFIKPILEKMDGTEELLVKLNREDLLRKQRTFDNGSIPHQIHLGELHAILRRQEDFYPFLKDNREKIEKILTFRIPYYVGPLARGNSRFAWMTRKSEETITPWNFEEVVDKGASAQSFIERMTNFDKNLPNEKVLPKHSLLYEYFTVYNELTKVKYVTEGMRKPAFLSGEQKKAIVDLLFKTNRKVTVKQLKEDYFKKIECFDSVEISGVEDRFNASLGTYHDLLKIIKDKDFLDNEENEDILEDIVLTLTLFEDREMIEERLKTYAHLFDDKVMKQLKRRRYTGWGRLSRKLINGIRDKQSGKTILDFLKSDGFANRNFMQLIHDDSLTFKEDIQKAQVSGQGDSLHEHIANLAGSPAIKKGILQTVKVVDELVKVMGRHKPENIVIEMARENQTTQKGQKNSRERMKRIEEGIKELGSQILKEHPVENTQLQNEKLYLYYLQNGRDMYVDQELDINRLSDYDVDAIVPQSFLKDDSIDNKVLTRSDKNRGKSDNVPSEEVVKKMKNYWRQLLNAKLITQRKFDNLTKAERGGLSELDKAGFIKRQLVETRQITKHVAQILDSRMNTKYDENDKLIREVKVITLKSKLVSDFRKDFQFYKVREINNYHHAHDAYLNAVVGTALIKKYPKLESEFVYGDYKVYDVRKMIAKSEQEIGKATAKYFFYSNIMNFFKTEITLANGEIRKRPLIETNGETGEIVWDKGRDFATVRKVLSMPQVNIVKKTEVQTGGFSKESILPKRNSDKLIARKKDWDPKKYGGFDSPTVAYSVLVVAKVEKGKSKKLKSVKELLGITIMERSSFEKNPIDFLEAKGYKEVKKDLIIKLPKYSLFELENGRKRMLASAGELQKGNELALPSKYVNFLYLASHYEKLKGSPEDNEQKQLFVEQHKHYLDEIIEQISEFSKRVILADANLDKVLSAYNKHRDKPIREQAENIIHLFTLTNLGAPAAFKYFDTTIDRKRYTSTKEVLDATLIHQSITGLYETRIDLSQLGGD

SEQ ID NO: 3 - protein, 1367 aa, Artificial Sequence
  Synthetic
DKKYSIGLAIGTNSVGWAVITDEYKVPSKKFKVLGNTDRHSIKKNLIGALLFDSGETAEATRLKRTARRRYTRRKNRICYLQEIFSNEMAKVDDSFFHRLEESFLVEEDKKHERHPIFGNIVDEVAYHEKYPTIYHLRKKLVDSTDKADLRLIYLALAHMIKFRGHFLIEGDLNPDNSDVDKLFIQLVQTYNQLFEENPINASGVDAKAILSARLSKSRRLENLIAQLPGEKKNGLFGNLIALSLGLTPNFKSNFDLAEDAKLQLSKDTYDDDLDNLLAQIGDQYADLFLAAKNLSDAILLSDILRVNTEITKAPLSASMIKRYDEHHQDLTLLKALVRQQLPEKYKEIFFDQSKNGYAGYIDGGASQEEFYKFIKPILEKMDGTEELLVKLNREDLLRKQRTFDNGSIPHQIHLGELHAILRRQEDFYPFLKDNREKIEKILTFRIPYYVGPLARGNSRFAWMTRKSEETITPWNFEEVVDKGASAQSFIERMTNFDKNLPNEKVLPKHSLLYEYFTVYNELTKVKYVTEGMRKPAFLSGEQKKAIVDLLFKTNRKVTVKQLKEDYFKKIECFDSVEISGVEDRFNASLGTYHDLLKIIKDKDFLDNEENEDILEDIVLTLTLFEDREMIEERLKTYAHLFDDKVMKQLKRRRYTGWGRLSRKLINGIRDKQSGKTILDFLKSDGFANRNFMQLIHDDSLTFKEDIQKAQVSGQGDSLHEHIANLAGSPAIKKGILQTVKVVDELVKVMGRHKPENIVIEMARENQTTQKGQKNSRERMKRIEEGIKELGSQILKEHPVENTQLQNEKLYLYYLQNGRDMYVDQELDINRLSDYDVDHIVPQSFLKDDSIDNKVLTRSDKNRGKSDNVPSEEVVKKMKNYWRQLLNAKLITQRKFDNLTKAERGGLSELDKAGFIKRQLVETRQITKHVAQILDSRMNTKYDENDKLIREVKVITLKSKLVSDFRKDFQFYKVREINNYHHAHDAYLNAVVGTALIKKYPKLESEFVYGDYKVYDVRKMIAKSEQEIGKATAKYFFYSNIMNFFKTEITLANGEIRKRPLIETNGETGEIVWDKGRDFATVRKVLSMPQVNIVKKTEVQTGGFSKESILPKRNSDKLIARKKDWDPKKYGGFDSPTVAYSVLVVAKVEKGKSKKLKSVKELLGITIMERSSFEKNPIDFLEAKGYKEVKKDLIIKLPKYSLFELENGRKRMLASAGELQKGNELALPSKYVNFLYLASHYEKLKGSPEDNEQKQLFVEQHKHYLDEIIEQISEFSKRVILADANLDKVLSAYNKHRDKPIREQAENIIHLFTLTNLGAPAAFKYFDTTIDRKRYTSTKEVLDATLIHQSITGLYETRIDLSQLGGD

SEQ ID NO: 4 - protein, 1367 aa, Artificial Sequence
  Synthetic
DKKYSIGLDIGTNSVGWAVITDEYKVPSKKFKVLGNTDRHSIKKNLIGALLFDSGETAEATRLKRTARRRYTRRKNRICYLQEIFSNEMAKVDDSFFHRLEESFLVEEDKKHERHPIFGNIVDEVAYHEKYPTIYHLRKKLVDSTDKADLRLIYLALAHMIKFRGHFLIEGDLNPDNSDVDKLFIQLVQTYNQLFEENPINASGVDAKAILSARLSKSRRLENLIAQLPGEKKNGLFGNLIALSLGLTPNFKSNFDLAEDAKLQLSKDTYDDDLDNLLAQIGDQYADLFLAAKNLSDAILLSDILRVNTEITKAPLSASMIKRYDEHHQDLTLLKALVRQQLPEKYKEIFFDQSKNGYAGYIDGGASQEEFYKFIKPILEKMDGTEELLVKLNREDLLRKQRTFDNGSIPHQIHLGELHAILRRQEDFYPFLKDNREKIEKILTFRIPYYVGPLARGNSRFAWMTRKSEETITPWNFEEVVDKGASAQSFIERMTNFDKNLPNEKVLPKHSLLYEYFTVYNELTKVKYVTEGMRKPAFLSGEQKKAIVDLLFKTNRKVTVKQLKEDYFKKIECFDSVEISGVEDRFNASLGTYHDLLKIIKDKDFLDNEENEDILEDIVLTLTLFEDREMIEERLKTYAHLFDDKVMKQLKRRRYTGWGRLSRKLINGIRDKQSGKTILDFLKSDGFANRNFMQLIHDDSLTFKEDIQKAQVSGQGDSLHEHIANLAGSPAIKKGILQTVKVVDELVKVMGRHKPENIVIEMARENQTTQKGQKNSRERMKRIEEGIKELGSQILKEHPVENTQLQNEKLYLYYLQNGRDMYVDQELDINRLSDYDVDHIVPQSFLKDDSIDNKVLTRSDKNRGKSDNVPSEEVVKKMKNYWRQLLNAKLITQRKFDNLTKAERGGLSELDKAGFIKRQLVETRQITKHVAQILDSRMNTKYDENDKLIREVKVITLKSKLVSDFRKDFQFYKVREINNYHHAHDAYLNAVVGTALIKKYPKLESEFVYGDYKVYDVRKMIAKSEQEIGKATAKYFFYSNIMNFFKTEITLANGEIRKRPLIETNGETGEIVWDKGRDFATVRKVLSMPQVNIVKKTEVQTGGFSKESILPKRNSDKLIARKKDWDPKKYGGFDSPTVAYSVLVVAKVEKGKSKKLKSVKELLGITIMERSSFEKNPIDFLEAKGYKEVKKDLIIKLPKYSLFELENGRKRMLASAGELQKGNELALPSKYVNFLYLASHYEKLKGSPEDNEQKQLFVEQHKHYLDEIIEQISEFSKRVILADANLDKVLSAYNKHRDKPIREQAENIIHLFTLTNLGAPAAFKYFDTTIDRKRYTSTKEVLDATLIHQSITGLYETRIDLSQLGGD

SEQ ID NO: 5 - protein, 887 aa, Natronobacterium gregoryi
MTVIDLDSTTTADELTSGHTYDISVTLTGVYDNTDEQHPRMSLAFEQDNGERRYITLWKNTTPKDVFTYDYATGSTYIFTNIDYEVKDGYENLTATYQTTVENATAQEVGTTDEDETFAGGEPLDHHLDDALNETPDDAETESDSGHVMTSFASRDQLPEWTLHTYTLTATDGAKTDTEYARRTLAYTVRQELYTDHDAAPVATDGLMLLTPEPLGETPLDLDCGVRVEADETRTLDYTTAKDRLLARELVEEGLKRSLWDDYLVRGIDEVLSKEPVLTCDEFDLHERYDLSVEVGHSGRAYLHINFRHRFVPKLTLADIDDDNIYPGLRVKTTYRPRRGHIVWGLRDECATDSLNTLGNQSVVAYHRNNQTPINTDLLDAIEAADRRVVETRRQGHGDDAVSFPQELLAVEPNTHQIKQFASDGFHQQARSKTRLSASRCSEKAQAFAERLDPVRLNGSTVEFSSEFFTGNNEQQLRLLYENGESVLTFRDGARGAHPDETFSKGIVNPPESFEVAVVLPEQQADTCKAQWDTMADLLNQAGAPPTRSETVQYDAFSSPESISLNVAGAIDPSEVDAAFVVLPPDQEGFADLASPTETYDELKKALANMGIYSQMAYFDRFRDAKIFYTRNVALGLLAAAGGVAFTTEHAMPGDADMFIGIDVSRSYPEDGASGQINIAATATAVYKDGTILGHSSTRPQLGEKLQSTDVRDIMKNAILGYQQVTGESPTHIVIHRDGFMNEDLDPATEFLNEQGVEYDIVEIRKQPQTRLLAVSDVQYDTPVKSIAAINQNEPRATVATFGAPEYLATRDGGGLPRPIQIERVAGETDIETLTRQVYLLSQSHIQVHNSTARLPITTAYADQASTHATKGYLVQTGAFESNVGFL

SEQ ID NO: 6 - protein, 1129 aa, Alicyclobacillus acidoterrestris
MAVKSIKVKLRLDDMPEIRAGLWKLHKEVNAGVRYYTEWLSLLRQENLYRRSPNGDGEQECDKTAEECKAELLERLRARQVENGHRGPAGSDDELLQLARQLYELLVPQAIGAKGDAQQIARKFLSPLADKDAVGGLGIAKAGNKPRWVRMREAGEPGWEEEKEKAETRKSADRTADVLRALADFGLKPLMRVYTDSEMSSVEWKPLRKGQAVRTWDRDMFQQAIERMMSWESWNQRVGQEYAKLVEQKNRFEQKNFVGQEHLVHLVNQLQQDMKEASPGLESKEQTAHYVTGRALRGSDKVFEKWGKLAPDAPFDLYDAEIKNVQRRNTRRFGSHDLFAKLAEPEYQALWREDASFLTRYAVYNSILRKLNHAKMFATFTLPDATAHPIWTRFDKLGGNLHQYTFLFNEFGERRHAIRFHKLLKVENGVAREVDDVTVPISMSEQLDNLLPRDPNEPIALYFRDYGAEQHFTGEFGGAKIQCRRDQLAHMHRRRGARDVYLNVSVRVQSQSEARGERRPPYAAVFRLVGDNHRAFVHFDKLSDYLAEHPDDGKLGSEGLLSGLRVMSVDLGLRTSASISVFRVARKDELKPNSKGRVPFFFPIKGNDNLVAVHERSQLLKLPGETESKDLRAIREERQRTLRQLRTQLAYLRLLVRCGSEDVGRRERSWAKLIEQPVDAANHMTPDWREAFENELQKLKSLHGICSDKEWMDAVYESVRRVWRHMGKQVRDWRKDVRSGERPKIRGYAKDVVGGNSIEQIEYLERQYKFLKSWSFFGKVSGQVIRAEKGSRFAITLREHIDHAKEDRLKKLADRIIMEALGYVYALDERGKGKWVAKYPPCQLILLEELSEYQFNNDRPPSENNQLMQWSHRGVFQELINQAQVHDLLVGTMYAAFSSRFDARTGAPGIRCRRVPARCTQEHNPEPFPWWLNKFVVEHTLDACPLRADDLIPTGEGEIFVSPFSAEEGDFHQIHADLNAAQNLQQRLWSDFDISQIRLRCDWGEVDGELVLIPRLTGKRTADSYSNKVFYTNTGVTYYERERGKKRRKVFAQEKLSEEEAELLVEADEAREKSVVLMRDPSGIINRGNWTRQKEFWSMVNQRIEGYLVKQIRSRVPLQDSACENTGDI

SEQ ID NO: 7 - protein, 1389 aa, Leptotrichia shahii
MGNLFGHKRWYEVRDKKDFKIKRKVKVKRNYDGNKYILNINENNNKEKIDNNKFIRKYINYKKNDNILKEFTRKFHAGNILFKLKGKEGIIRIENNDDFLETEEVVLYIEAYGKSEKLKALGITKKKIIDEAIRQGITKDDKKIEIKRQENEEEIEIDIRDEYTNKTLNDCSIILRIIENDELETKKSIYEIFKNINMSLYKIIEKIIENETEKVFENRYYEEHLREKLLKDDKIDVILTNFMEIREKIKSNLEILGFVKFYLNVGGDKKKSKNKKMLVEKILNINVDLTVEDIADFVIKELEFWNITKRIEKVKKVNNEFLEKRRNRTYIKSYVLLDKHEKFKIERENKKDKIVKFFVENIKNNSIKEKIEKILAEFKIDELIKKLEKELKKGNCDTEIFGIFKKHYKVNFDSKKFSKKSDEEKELYKIIYRYLKGRIEKILVNEQKVRLKKMEKIEIEKILNESILSEKILKRVKQYTLEHIMYLGKLRHNDIDMTTVNTDDFSRLHAKEELDLELITFFASTNMELNKIFSRENINNDENIDFFGGDREKNYVLDKKILNSKIKIIRDLDFIDNKNNITNNFIRKFTKIGTNERNRILHAISKERDLQGTQDDYNKVINIIQNLKISDEEVSKALNLDVVFKDKKNIITKINDIKISEENNNDIKYLPSFSKVLPEILNLYRNNPKNEPFDTIETEKIVLNALIYVNKELYKKLILEDDLEENESKNIFLQELKKTLGNIDEIDENIIENYYKNAQISASKGNNKAIKKYQKKVIECYIGYLRKNYEELFDFSDFKMNIQEIKKQIKDINDNKTYERITVKTSDKTIVINDDFEYIISIFALLNSNAVINKIRNRFFATSVWLNTSEYQNIIDILDEIMQLNTLRNECITENWNLNLEEFIQKMKEIEKDFDDFKIQTKKEIFNNYYEDIKNNILTEFKDDINGCDVLEKKLEKIVIFDDETKFEIDKKSNILQDEQRKLSNINKKDLKKKVDQYIKDKDQEIKSKILCRIIFNSDFLKKYKKEIDNLIEDMESENENKFQEIYYPKERKNELYIYKKNLFLNIGNPNFDKIYGLISNDIKMADAKFLFNIDGKNIRKNKISEIDAILKNLNDKLNGYSKEYKEKYIKKLKENDDFFAKNIQNKNYKSFEKDYNRVSEYKKIRDLVEFNYLNKIESYLIDINWKLAIQMARFERDMHYIVNGLRELGIIKLSGYNTGISRAYPKRNGSDGFYTTTAYYKFFDEESYKKFEKICYGFGIDLSENSEINKPENESIRNYISHFYIVRNPFADYSIAEQIDRVSNLLSYSTRYNNSTYASVFEVFKKDVNLDYDELKKKFKLIGNNDILERLMKPKKVSVLELESYNSDYIKNLIIELLTKIENTNDTL

SEQ ID NO: 8 - protein, 1052 aa, Artificial Sequence
  Synthetic
KRNYILGLDIGITSVGYGIIDYETRDVIDAGVRLFKEANVENNEGRRSKRGARRLKRRRRHRIQRVKKLLFDYNLLTDHSELSGINPYEARVKGLSQKLSEEEFSAALLHLAKRRGVHNVNEVEEDTGNELSTKEQISRNSKALEEKYVAELQLERLKKDGEVRGSINRFKTSDYVKEAKQLLKVQKAYHQLDQSFIDTYIDLLETRRTYYEGPGEGSPFGWKDIKEWYEMLMGHCTYFPEELRSVKYAYNADLYNALNDLNNLVITRDENEKLEYYEKFQIIENVFKQKKKPTLKQIAKEILVNEEDIKGYRVTSTGKPEFTNLKVYHDIKDITARKEIIENAELLDQIAKILTIYQSSEDIQEELTNLNSELTQEEIEQISNLKGYTGTHNLSLKAINLILDELWHTNDNQIAIFNRLKLVPKKVDLSQQKEIPTTLVDDFILSPVVKRSFIQSIKVINAIIKKYGLPNDIIIELAREKNSKDAQKMINEMQKRNRQTNERIEEIIRTTGKENAKYLIEKIKLHDMQEGKCLYSLEAIPLEDLLNNPFNYEVDHIIPRSVSFDNSFNNKVLVKQEENSKKGNRTPFQYLSSSDSKISYETFKKHILNLAKGKGRISKTKKEYLLEERDINRFSVQKDFINRNLVDTRYATRGLMNLLRSYFRVNNLDVKVKSINGGFTSFLRRKWKFKKERNKGYKHHAEDALIIANADFIFKEWKKLDKAKKVMENQMFEEKQAESMPEIETEQEYKEIFITPHQIKHIKDFKDYKYSHRVDKKPNRELINDTLYSTRKDDKGNTLIVNNLNGLYDKDNDKLKKLINKSPEKLLMYHHDPQTYQKLKLIMEQYGDEKNPLYKYYEETGNYLTKYSKKDNGPVIKKIKYYGNKLNAHLDITDDYPNSRNKVVKLSLKPYRFDVYLDNGVYKFVTVKNLDVIKKENYYEVNSKCYEEAKKLKKISNQAEFIASFYNNDLIKINGELYRVIGVNNDLLNRIEVNMIDITYREYLENMNDKRPPRIIKTIASKTQSIKKYSTDILGNLYEVKSKKHPQIIKKG

SEQ ID NO: 9 - protein, 198 aa, Homo sapiens [sequence omitted]

SEQ ID NO: 10 - protein, 198 aa, Mus musculus
MDSLLMKQKKFLYHFKNVRWAKGRHETYLCYVVKRRDSATSCSLDFGHLRNKSGCHVELLFLRYISDWDLDPGRCYRVTWFTSWSPCYDCARHVAEFLRWNPNLSLRIFTARLYFCEDRKAEPEGLRRLHRAGVQIGIMTFKDYFYCWNTFVENRERTFKAWEGLHENSVRLTRQLRRILLPLYEVDDLRDAFRMLGF

SEQ ID NO: 11 - protein, 198 aa, Canis familiaris
MDSLLMKQRKFLYHFKNVRWAKGRHETYLCYVVKRRDSATSFSLDFGHLRNKSGCHVELLFLRYISDWDLDPGRCYRVTWFTSWSPCYDCARHVADFLRGYPNLSLRIFAARLYFCEDRKAEPEGLRRLHRAGVQIAIMTFKDYFYCWNTFVENREKTFKAWEGLHENSVRLSRQLRRILLPLYEVDDLRDAFRTLGL

SEQ ID NO: 12 - protein, 199 aa, Bos taurus
MDSLLKKQRQFLYQFKNVRWAKGRHETYLCYVVKRRDSPTSFSLDFGHLRNKAGCHVELLFLRYISDWDLDPGRCYRVTWFTSWSPCYDCARHVADFLRGYPNLSLRIFTARLYFCDKERKAEPEGLRRLHRAGVQIAIMTFKDYFYCWNTFVENHERTFKAWEGLHENSVRLSRQLRRILLPLYEVDDLRDAFRTLGL

SEQ ID NO: 13 - protein, 239 aa, R. rattus
MAVGSKPKAALVGPHWERERIWCFLCSTGLGTQQTGQTSRWLRPAATQDPVSPPRSLLMKQRKFLYHFKNVRWAKGRHETYLCYVVKRRDSATSFSLDFGYLRNKSGCHVELLFLRYISDWDLDPGRCYRVTWFTSWSPCYDCARHVADFLRGNPNLSLRIFTARLTGWGALPAGLMSPARPSDYFYCWNTFVENHERTFKAWEGLHENSVRLSRRLRRILLPLYEVDDLRDAFRTLGL

SEQ ID NO: 14 - protein, 429 aa, Mus musculus
MGPFCLGCSHRKCYSPIRNLISQETFKFHFKNLGYAKGRKDTFLCYEVTRKDCDSPVSLHHGVFKNKDNIHAEICFLYWFHDKVLKVLSPREEFKITWYMSWSPCFECAEQIVRFLATHHNLSLDIFSSRLYNVQDPETQQNLCRLVQEGAQVAAMDLYEFKKCWKKFVDNGGRRFRPWKRLLTNFRYQDSKLQEILRPCYIPVPSSSSSTLSNICLTKGLPETRFCVEGRRMDPLSEEEFYSQFYNQRVKHLCYYHRMKPYLCYQLEQFNGQAPLKGCLLSEKGKQHAEILFLDKIRSMELSQVTITCYLTWSPCPNCAWQLAAFKRDRPDLILHIYTSRLYFHWKRPFQKGLCSLWQSGILVDVMDLPQFTDCWTNFVNPKRPFWPWKGLEIISRRTQRRLRRIKESWGLQDLVNDFGNLQLGPPMS

SEQ ID NO: 15 - protein, 429 aa, R. rattus
MGPFCLGCSHRKCYSPIRNLISQETFKFHFKNLRYAIDRKDTFLCYEVTRKDCDSPVSLHHGVFKNKDNIHAEICFLYWFHDKVLKVLSPREEFKITWYMSWSPCFECAEQVLRFLATHHNLSLDIFSSRLYNIRDPENQQNLCRLVQEGAQVAAMDLYEFKKCWKKFVDNGGRRFRPWKKLLTNFRYQDSKLQEILRPCYIPVPSSSSSTLSNICLTKGLPETRFCVERRRVHLLSEEEFYSQFYNQRVKHLCYYHGVKPYLCYQLEQFNGQAPLKGCLLSEKGKQHAEILFLDKIRSMELSQVIITCYLTWSPCPNCAWQLAAFKRDRPDLILHIYTSRLYFHWKRPFQKGLCSLWQSGILVDVMDLPQFTDCWTNFVNPKRPFWPWKGLEIISRRTQRRLHRIKESWGLQDLVNDFGNLQLGPPMS

SEQ ID NO: 16 - protein, 370 aa, Rhesus macaque
MVEPMDPRTFVSNFNNRPILSGLNTVWLCCEVKTKDPSGPPLDAKIFQGKVYSKAKYHPEMRFLRWFHKWRQLHHDQEYKVTWYVSWSPCTRCANSVATFLAKDPKVTLTIFVARLYYFWKPDYQQALRILCQKRGGPHATMKIMNYNEFQDCWNKFVDGRGKPFKPRNNLPKHYTLLQATLGELLRHLMDPGTFTSNFNNKPWVSGQHETYLCYKVERLHNDTWVPLNQHRGFLRNQAPNIHGFPKGRHAELCFLDLIPFWKLDGQQYRVTCFTSWSPCFSCAQEMAKFISNNEHVSLCIFAARIYDDQGRYQEGLRALHRDGAKIAMMNYSEFEYCWDTFVDRQGRPFQPWDGLDEHSQALSGRLRAI

SEQ ID NO: 17 - protein, 384 aa, Pan troglodytes
MKPHFRNPVERMYQDTFSDNFYNRPILSHRNTVWLCYEVKTKGPSRPPLDAKIFRGQVYSKLKYHPEMRFFHWFSKWRKLHRDQEYEVTWYISWSPCTKCTRDVATFLAEDPKVTLTIFVARLYYFWDPDYQEALRSLCQKRDGPRATMKIMNYDEFQHCWSKFVYSQRELFEPWNNLPKYYILLHIMLGEILRHSMDPPTFTSNFNNELWVRGRHETYLCYEVERLHNDTWVLLNQRRGFLCNQAPHKHGFLEGRHAELCFLDVIPFWKLDLHQDYRVTCFTSWSPCFSCAQEMAKFISNNKHVSLCIFAARIYDDQGRCQEGLRTLAKAGAKISIMTYSEFKHCWDTFVDHQGCPFQPWDGLEEHSQALSGRLRAILQNQGN

SEQ ID NO: 18 - protein, 377 aa, Chlorocebus sabaeus
MNPQIRNMVEQMEPDIFVYYFNNRPILSGRNTVWLCYEVKTKDPSGPPLDANIFQGKLYPEAKDHPEMKFLHWFRKWRQLHRDQEYEVTWYVSWSPCTRCANSVATFLAEDPKVTLTIFVARLYYFWKPDYQQALRILCQERGGPHATMKIMNYNEFQHCWNEFVDGQGKPFKPRKNLPKHYTLLHATLGELLRHVMDPGTFTSNFNNKPWVSGQRETYLCYKVERSHNDTWVLLNQHRGFLRNQAPDRHGFPKGRHAELCFLDLIPFWKLDDQQYRVTCFTSWSPCFSCAQKMAKFISNNKHVSLCIFAARIYDDQGRCQEGLRTLHRDGAKIAVMNYSEFEYCWDTFVDRQGRPFQPWDGLDEHSQALSGRLRAI

SEQ ID NO: 19 - protein, 384 aa, Homo sapiens
MKPHFRNTVERMYRDTFSYNFYNRPILSRRNTVWLCYEVKTKGPSRPPLDAKIFRGQVYSELKYHPEMRFFHWFSKWRKLHRDQEYEVTWYISWSPCTKCTRDMATFLAEDPKVTLTIFVARLYYFWDPDYQEALRSLCQKRDGPRATMKIMNYDEFQHCWSKFVYSQRELFEPWNNLPKYYILLHIMLGEILRHSMDPPTFTFNFNNEPWVRGRHETYLCYEVERMHNDTWVLLNQRRGFLCNQAPHKHGFLEGRHAELCFLDVIPFWKLDLDQDYRVTCFTSWSPCFSCAQEMAKFISKNKHVSLCIFTARIYDDQGRCQEGLRTLAEAGAKISIMTYSEFKHCWDTFVDHQGCPFQPWDGLDEHSQDLSGRLRAILQNQEN

SEQ ID NO: 20 - protein, 373 aa, Homo sapiens
MKPHFRNTVERMYRDTFSYNFYNRPILSRRNTVWLCYEVKTKGPSRPRLDAKIFRGQVYSQPEHHAEMCFLSWFCGNQLPAYKCFQITWFVSWTPCPDCVAKLAEFLAEHPNVTLTISAARLYYYWERDYRRALCRLSQAGARVKIMDDEEFAYCWENFVYSEGQPFMPWYKFDDNYAFLHRTLKEILRNPMEAMYPHIFYFHFKNLRKAYGRNESWLCFTMEVVKHHSPVSWKRGVFRNQVDPETHCHAERCFLSWFCDDILSPNTNYEVTWYTSWSPCPECAGEVAEFLARHSNVNLTIFTARLYYFWDTDYQEGLRSLSQEGASVEIMGYKDFKYCWENFVYNDDEPFKPWKGLKYNFLFLDSKLQEILE

SEQ ID NO: 21 - protein, 382 aa, Homo sapiens
MNPQIRNPMERMYRDTFYDNFENEPILYGRSYTWLCYEVKIKRGRSNLLWDTGVFRGQVYFKPQYHAEMCFLSWFCGNQLPAYKCFQITWFVSWTPCPDCVAKLAEFLSEHPNVTLTISAARLYYYWERDYRRALCRLSQAGARVTIMDYEEFAYCWENFVYNEGQQFMPWYKFDENYAFLHRTLKEILRYLMDPDTFTFNFNNDPLVLRRRQTYLCYEVERLDNGTWVLMDQHMGFLCNEAKNLLCGFYGRHAELRFLDLVPSLQLDPAQIYRVTWFISWSPCFSWGCAGEVRAFLQENTHVRLRIFAARIYDYDPLYKEALQMLRDAGAQVSIMTYDEFEYCWDTFVYRQGCPFQPWDGLEEHSQALSGRLRAILQNQGN

SEQ ID NO: 22 - protein, 396 aa, R. rattus
MQPQGLGPNAGMGPVCLGCSHRRPYSPIRNPLKKLYQQTFYFHFKNVRYAWGRKNNFLCYEVNGMDCALPVPLRQGVFRKQGHIHAELCFIYWFHDKVLRVLSPMEEFKVTWYMSWSPCSKCAEQVARFLAAHRNLSLAIFSSRLYYYLRNPNYQQKLCRLIQEGVHVAAMDLPEFKKCWNKFVDNDGQPFRPWMRLRINFSFYDCKLQEIFSRMNLLREDVFYLQFNNSHRVKPVQNRYYRRKSYLCYQLERANGQEPLKGYLLYKKGEQHVEILFLEKMRSMELSQVRITCYLTWSPCPNCARQLAAFKKDHPDLILRIYTSRLYFYWRKKFQKGLCTLWRSGIHVDVMDLPQFADCWTNFVNPQRPFRPWNELEKNSWRIQRRLRRIKESWGL

SEQ ID NO: 23 - protein, 227 aa, Bos taurus
DGWEVAFRSGTVLKAGVLGVSMTEGWAGSGHPGQGACVWTPGTRNTMNLLREVLFKQQFGNQPRVPAPYYRRKTYLCYQLKQRNDLTLDRGCFRNKKQRHAEIRFIDKINSLDLNPSQSYKIICYITWSPCPNCANELVNFITRNNHLKLEIFASRLYFHWIKSFKMGLQDLQNAGISVAVMTHTEFEDCWEQFVDNQSRPFQPWDKLEQYSASIRRRLQRILTAPI

SEQ ID NO: 24 - protein, 490 aa, Chimpanzee
MNPQIRNPMEWMYQRTFYYNFENEPILYGRSYTWLCYEVKIRRGHSNLLWDTGVFRGQMYSQPEHHAEMCFLSWFCGNQLSAYKCFQITWFVSWTPCPDCVAKLAKFLAEHPNVTLTISAARLYYYWERDYRRALCRLSQAGARVKIMDDEEFAYCWENFVYNEGQPFMPWYKFDDNYAFLHRTLKEIIRHLMDPDTFTFNFNNDPLVLRRHQTYLCYEVERLDNGTWVLMDQHMGFLCNEAKNLLCGFYGRHAELRFLDLVPSLQLDPAQIYRVTWFISWSPCFSWGCAGQVRAFLQENTHVRLRIFAARIYDYDPLYKEALQMLRDAGAQVSIMTYDEFEYCWDTFVYRQGCPFQPWDGLEEHSQALSGRLRAILQVRASSLCMVPHRPPPPPQSPGPCLPLCSEPPLGSLLPTGRPAPSLPFLLTASFSFPPPASLPPLPSLSLSPGHLPVPSFHSLTSCSIQPPCSSRIRETEGWASVSKEGRDLG

SEQ ID NO: 25 - protein, 190 aa, Homo sapiens
MNPQIRNPMKAMYPGTFYFQFKNLWEANDRNETWLCFTVEGIKRRSVVSWKTGVFRNQVDSETHCHAERCFLSWFCDDILSPNTKYQVTWYTSWSPCPDCAGEVAEFLARHSNVNLTIFTARLYYFQYPCYQEGLRSLSQEGVAVEIMDYEDFKYCWENFVYNDNEPFKPWKGLKTNFRLLKRRLRESLQ

SEQ ID NO: 26 - protein, 190 aa, Gorilla gorilla
MNPQIRNPMKAMYPGTFYFQFKNLWEANDRNETWLCFTVEGIKRRSVVSWKTGVFRNQVDSETHCHAERCFLSWFCDDILSPNTNYQVTWYTSWSPCPECAGEVAEFLARHSNVNLTIFTARLYYFQDTDYQEGLRSLSQEGVAVKIMDYKDFKYCWENFVYNDDEPFKPWKGLKYNFRFLKRRLQEILE

SEQ ID NO: 27 - protein, 199 aa, Homo sapiens
MEASPASGPRHLMDPHIFTSNFNNGIGRHKTYLCYEVERLDNGTSVKMDQHRGFLHNQAKNLLCGFYGRHAELRFLDLVPSLQLDPAQIYRVTWFISWSPCFSWGCAGEVRAFLQENTHVRLRIFAARIYDYDPLYKEALQMLRDAGAQVSIMTYDEFKHCWDTFVDHQGCPFQPWDGLDEHSQALSGRLRAILQNQGN

SEQ ID NO: 28 - protein, 202 aa, Rhesus macaque
MDGSPASRPRHLMDPNTFTFNFNNDLSVRGRHQTYLCYEVERLDNGTWVPMDERRGFLCNKAKNVPCGDYGCHVELRFLCEVPSWQLDPAQTYRVTWFISWSPCFRRGCAGQVRVFLQENKHVRLRIFAARIYDYDPLYQEALRTLRDAGAQVSIMTYEEFKHCWDTFVDRQGRPFQPWDGLDEHSQALSGRLRAILQNQGN

SEQ ID NO: 29 - protein, 185 aa, Bos taurus
MDEYTFTENFNNQGWPSKTYLCYEMERLDGDATIPLDEYKGFVRNKGLDQPEKPCHAELYFLGKIHSWNLDRNQHYRLTCFISWSPCYDCAQKLTTFLKENHHISLHILASRIYTHNRFGCHQSGLCELQAAGARITIMTFEDFKHCWETFVDHKGKPFQPWEGLNVKSQALCTELQAILKTQQN

SEQ ID NO: 30 - protein, 200 aa, Homo sapiens
MALLTAETFRLQFNNKRRLRRPYYPRKALLCYQLTPQNGSTPTRGYFENKKKCHAEICFINEIKSMGLDETQCYQVTCYLTWSPCSSCAWELVDFIKAHDHLNLGIFASRLYYHWCKPQQKGLRLLCGSQVPVEVMGFPKFADCWENFVDHEKPLSFNPYKMLEELDKNSRAIKRRLERIKIPGVRAQGRYMDILCDAEV

SEQ ID NO: 31 - protein, 210 aa, Rhesus macaque
MALLTAKTFSLQFNNKRRVNKPYYPRKALLCYQLTPQNGSTPTRGHLKNKKKDHAEIRFINKIKSMGLDETQCYQVTCYLTWSPCPSCAGELVDFIKAHRHLNLRIFASRLYYHWRPNYQEGLLLLCGSQVPVEVMGLPEFTDCWENFVDHKEPPSFNPSEKLEELDKNSQAIKRRLERIKSRSVDVLENGLRSLQLGPVTPSSSIRNSR

SEQ ID NO: 32 - protein, 386 aa, Homo sapiens
MNPQIRNPMERMYRDTFYDNFENEPILYGRSYTWLCYEVKIKRGRSNLLWDTGVFRGPVLPKRQSNHRQEVYFRFENHAEMCFLSWFCGNRLPANRRFQITWFVSWNPCLPCVVKVTKFLAEHPNVTLTISAARLYYYRDRDWRWVLLRLHKAGARVKIMDYEDFAYCWENFVCNEGQPFMPWYKFDDNYASLHRTLKEILRNPMEAMYPHIFYFHFKNLLKACGRNESWLCFTMEVTKHHSAVFRKRGVFRNQVDPETHCHAERCFLSWFCDDILSPNTNYEVTWYTSWSPCPECAGEVAEFLARHSNVNLTIFTARLCYFWDTDYQEGLCSLSQEGASVKIMGYKDFVSCWKNFVYSDDEPFKPWKGLQTNFRLLKRRLREILQ

SEQ ID NO: 33 - protein, 236 aa, Homo sapiens
MTSEKGPSTGDPTLRRRIEPWEFDVFYDPRELRKEACLLYEIKWGMSRKIWRSSGKNTTNHVEVNFIKKFTSERDFHPSMSCSITWFLSWSPCWECSQAIREFLSRHPGVTLVIYVARLFWHMDQQNRQGLRDLVNSGVTIQIMRASEYYHCWRNFVNYPPGDEAHWPQYPPLWMMLYALELHCIILSLPPCLKISRRWQNHLTFFRLHLQNCHYQTIPPHILLATGLIHPSVAWR

SEQ ID NO: 34 - protein, 229 aa, Mus musculus
MSSETGPVAVDPTLRRRIEPHEFEVFFDPRELRKETCLLYEINWGGRHSVWRHTSQNTSNHVEVNFLEKFTTERYFRPNTRCSITWFLSWSPCGECSRAITEFLSRHPYVTLFIYIARLYHHTDQRNRQGLRDLISSGVTIQIMTEQEYCYCWRNFVNYPPSNEAYWPRYPHLWVKLYVLELYCIILGLPPCLKILRRKQPQLTFFTITLQTCHYQRIPPHLLWATGLK

SEQ ID NO: 35 - protein, 229 aa, R. rattus [sequence omitted]

SEQ ID NO: 36 - protein, 224 aa, Homo sapiens
MAQKEEAAVATEAASQNGEDLENLDDPEKLKELIELPPFEIVTGERLPANFFKFQFRNVEYSSGRNKTFLCYVVEAQGKGGQVQASRGYLEDEHAAAHAEEAFFNTILPAFDPALRYNVTWYVSSSPCAACADRIIKTLSKTKNLRLLILVGRLFMWEEPEIQAALKKLKEAGCKLRIMKPQDFEYVWQNFVEQEEGESKAFQPWEDIQENFLYYEEKLADILK

SEQ ID NO: 37 - protein, 224 aa, Mus musculus
MAQKEEAAEAAAPASQNGDDLENLEDPEKLKELIDLPPFEIVTGVRLPVNFFKFQFRNVEYSSGRNKTFLCYVVEVQSKGGQAQATQGYLEDEHAGAHAEEAFFNTILPAFDPALKYNVTWYVSSSPCAACADRILKTLSKTKNLRLLILVSRLFMWEEPEVQAALKKLKEAGCKLRIMKPQDFEYIWQNFVEQEEGESKAFEPWEDIQENFLYYEEKLADILK

SEQ ID NO: 38 - protein, 224 aa, R. rattus
MAQKEEAAEAAAPASQNGDDLENLEDPEKLKELIDLPPFEIVTGVRLPVNFFKFQFRNVEYSSGRNKTFLCYVVEAQSKGGQVQATQGYLEDEHAGAHAEEAFFNTILPAFDPALKYNVTWYVSSSPCAACADRILKTLSKTKNLRLLILVSRLFMWEEPEVQAALKKLKEAGCKLRIMKPQDFEYLWQNFVEQEEGESKAFEPWEDIQENFLYYEEKLADILK

SEQ ID NO: 39 - protein, 224 aa, Bos taurus
MAQKEEAAAAAEPASQNGEEVENLEDPEKLKELIELPPFEIVTGERLPAHYFKFQFRNVEYSSGRNKTFLCYVVEAQSKGGQVQASRGYLEDEHATNHAEEAFFNSIMPTFDPALRYMVTWYVSSSPCAACADRIVKTLNKTKNLRLLILVGRLFMWEEPEIQAALRKLKEAGCRLRIMKPQDFEYIWQNFVEQEEGESKAFEPWEDIQENFLYYEEKLADILK

SEQ ID NO: 40 - protein, 208 aa, Petromyzon marinus
MTDAEYVRIHEKLDIYTFKKQFFNNKKSVSHRCYVLFELKRRGERRACFWGYAVNKPQSGTERGIHAEIFSIRKVEEYLRDNPGQFTINWYSSWSPCADCAEKILEWYNQELRGNGHTLKIWACKLYYEKNARNQIGLWNLRDNGVGLNVMVSEHYQCCRKIFIQSSHNQLNENRWLEKTLKRAEKRRSELSIMIQVKILHTTKSPAV

SEQ ID NO: 41 - protein, 384 aa, Homo sapiens
MKPHFRNTVERMYRDTFSYNFYNRPILSRRNTVWLCYEVKTKGPSRPPLDAKIFRGQVYSELKYHPEMRFFHWFSKWRKLHRDQEYEVTWYISWSPCTKCTRDMATFLAEDPKVTLTIFVARLYYFWDPDYQEALRSLCQKRDGPRATMKIMNYDEFQHCWSKFVYSQRELFEPWNNLPKYYILLHIMLGEILRHSMDPPTFTFNFNNEPWVRGRHETYLCYEVERMHNDTWVLLNQRRGFLCNQAPHKHGFLEGRHAELCFLDVIPFWKLDLDQDYRVTCFTSWSPCFSCAQEMAKFISKNKHVSLCIFTARIYRRQGRCQEGLRTLAEAGAKISIMTYSEFKHCWDTFVDHQGCPFQPWDGLDEHSQDLSGRLRAILQNQEN

SEQ ID NO: 42 - protein, 184 aa, Homo sapiens
MDPPTFTFNFNNEPWVRGRHETYLCYEVERMHNDTWVLLNQRRGFLCNQAPHKHGFLEGRHAELCFLDVIPFWKLDLDQDYRVTCFTSWSPCFSCAQEMAKFISKNKHVSLCIFTARIYDDQGRCQEGLRTLAEAGAKISIMTYSEFKHCWDTFVDHQGCPFQPWDGLDEHSQDLSGRLRAILQ

SEQ ID NO: 43 - protein, 184 aa, Homo sapiens
MDPPTFTFNFNNEPWVRGRHETYLCYEVERMHNDTWVLLNQRRGFLCNQAPHKHGFLEGRHAELCFLDVIPFWKLDLDQDYRVTCFTSWSPCFSCAQEMAKFISKNKHVSLCIFTARIYRRQGRCQEGLRTLAEAGAKISIMTYSEFKHCWDTFVDHQGCPFQPWDGLDEHSQDLSGRLRAILQ

SEQ ID NO: 44 - protein, 167 aa, Artificial Sequence
  Synthetic
MSEVEFSHEYWMRHALTLAKRAWDEREVPVGAVLVHNNRVIGEGWNRPIGRHDPTAHAEIMALRQGGLVMQNYRLIDATLYVTLEPCVMCAGAMIHSRIGRVVFGARDAKTGAAGSLMDVLHHPGMNHRVEITEGILADECAALLSDFFRMRRQEIKAQKKAQSSTD

SEQ ID NO: 45 - protein, 178 aa, E. coli
MRRAFITGVFFLSEVEFSHEYWMRHALTLAKRAWDEREVPVGAVLVHNNRVIGEGWNRPIGRHDPTAHAEIMALRQGGLVMQNYRLIDATLYVTLEPCVMCAGAMIHSRIGRVVFGARDAKTGAAGSLMDVLHHPGMNHRVEITEGILADECAALLSDFFRMRRQEIKAQKKAQSSTD

SEQ ID NO: 46 - protein, 160 aa, Staphylococcus aureus
MGSHMTNDIYFMTLAIEEAKKAAQLGEVPIGAIITKDDEVIARAHNLRETLQQPTAHAEHIAIERAAKVLGSWRLEGCTLYVTLEPCVMCAGTIVMSRIPRVVYGADDPKGGCSGSLMNLLQQSNFNHRAIVDKGVLKEACSTLLTTFFKNLRANKKSTN

SEQ ID NO: 47 - protein, 161 aa, Bacillus subtilis
MTQDELYMKEAIKEAKKAEEKGEVPIGAVLVINGEIIARAHNLRETEQRSIAHAEMLVIDEACKALGTWRLEGATLYVTLEPCPMCAGAVVLSRVEKVVFGAFDPKGGCSGTLMNLLQEERFNHQAEVVSGVLEEECGGMLSAFFRELRKKKKAARKNLSE

SEQ ID NO: 48 - protein, 183 aa, Salmonella typhimurium
MPPAFITGVTSLSDVELDHEYWMRHALTLAKRAWDEREVPVGAVLVHNHRVIGEGWNRPIGRHDPTAHAEIMALRQGGLVLQNYRLLDTTLYVTLEPCVMCAGAMVHSRIGRVVFGARDAKTGAAGSLIDVLHHPGMNHRVEIIEGVLRDECATLLSDFFRMRRQEIKALKKADRAEGAGPAV

SEQ ID NO: 49 - protein, 164 aa, Shewanella putrefaciens
MDEYWMQVAMQMAEKAEAAGEVPVGAVLVKDGQQIATGYNLSISQHDPTAHAEILCLRSAGKKLENYRLLDATLYITLEPCAMCAGAMVHSRIARVVYGARDEKTGAAGTVVNLLQHPAFNHQVEVTSGVLAEACSAQLSRFFKRRRDEKKALKLAQRAQQGIE

SEQ ID NO: 50 - protein, 173 aa, Haemophilus influenzae
MDAAKVRSEFDEKMMRYALELADKAEALGEIPVGAVLVDDARNIIGEGWNLSIVQSDPTAHAEIIALRNGAKNIQNYRLLNSTLYVTLEPCTMCAGAILHSRIKRLVFGASDYKTGAIGSRFHFFDDYKMNHTLEITSGVLAEECSQKLSTFFQKRREEKKIEKALLKSLSDK

SEQ ID NO: 51 - protein, 161 aa, Caulobacter crescentus
MRTDESEDQDHRMMRLALDAARAAAEAGETPVGAVILDPSTGEVIATAGNGPIAAHDPTAHAEIAAMRAAAAKLGNYRLTDLTLVVTLEPCAMCAGAISHARIGRVVFGADDPKGGAVVHGPKFFAQPTCHWRPEVTGGVLADESADLLRGFFRARRKAKI

SEQ ID NO: 52 - protein, 179 aa, Geobacter sulfurreducens
MSSLKKTPIRDDAYWMGKAIREAAKAAARDEVPIGAVIVRDGAVIGRGHNLREGSNDPSAHAEMIAIRQAARRSANWRLTGATLYVTLEPCLMCMGAIILARLERVVFGCYDPKGGAAGSLYDLSADPRLNHQVRLSPGVCQEECGTMLSDFFRDLRRRKKAKATPALFIDERKVPPEP

SEQ ID NO: 53 - protein, 167 aa, Artificial Sequence
  Synthetic
MSEVEFSHEYWMRHALTLAKRAWDEREVPVGAVLVHNNRVIGEGWNRPIGRHDPTAHAAIMALRQGGLVMQNYRLIDATLYVTLEPCVMCAGAMIHSRIGRVVFGARDAKTGAAGSLMDVLHHPGMNHRVEITEGILADECAALLSDFFRMRRQEIKAQKKAQSSTD

SEQ ID NO: 54 - protein, 167 aa, Artificial Sequence
  Synthetic
MSEVEFSHEYWMRHALTLAKRARDEREVPVGAVLVLNNRVIGEGWNRAIGLHDPTAHAEIMALRQGGLVMQNYRLIDATLYVTFEPCVMCAGAMIHSRIGRVVFGVRNAKTGAAGSLMDVLHYPGMNHRVEITEGILADECAALLCYFFRMPRQVFNAQKKAQSSTD

SEQ ID NO: 55 - protein, 167 aa, Artificial Sequence
  Synthetic
MSEVEFSHEYWMRHALTLAKRARDEREVPVGAVLVLNNRVIGEGWNRAIGLHDPTAHAEIMALRQGGLVMQNYRLIDATLYVTFEPCVMCAGAMIHSRIGRVVFGWRNAKTGAAGSLMDVLHYPGMNHRVEITEGILADECAALLCYFFRMPRQVFNAQKKAQSSTD

SEQ ID NO: 56 - protein, 167 aa, Artificial Sequence
  Synthetic
MSEVEFSHEYWMRHALTLAKRARDEREVPVGAVLVLNNRVIGEGWNRAIGLHDPTAHAEIMALRQGGLVMQNYRLIDATLYVTFEPCVMCAGAMIHSRIGRVVFGVRWAKTGAAGSLMDVLHYPGMNHRVEITEGILADECAALLCYFFRMPRQVFNAQKKAQSSTD

SEQ ID NO: 57 - protein, 167 aa, Artificial Sequence
  Synthetic
MSEVEFSHEYWMRHALTLAKRARDEREVPVGAVLVLNNRVIGEGWNRAIGLHDPTAHAEIMALRQGGLVMQNYRLIDATLYVTFEPCVMCAGAMIHSRIGRVVFGVRQAKTGAAGSLMDVLHYPGMNHRVEITEGILADECAALLCYFFRMPRQVFNAQKKAQSSTD

SEQ ID NO: 58 - protein, 167 aa, Artificial Sequence
  Synthetic
MSEVEFSHEYWMRHALTLAKRARDEREVPVGAVLVLNNRVIGEGWNRAIGLHDPTAHAEIMALRQGGLVMQNYRLIDATLYVTFEPCVMCAGAMIHSRIGRVVFGFRNAKTGAAGSLMDVLHYPGMNHRVEITEGILADECAALLCYFFRMPRQVFNAQKKAQSSTD

SEQ ID NO: 59 - protein, 167 aa, Artificial Sequence
  Synthetic
MSEVEFSHEYWMRHALTLAKRARDEREVPVGAVLVLNNRVIGEGWNRAIGLHDPTAHAEIMALRQGGLVMQNYRLIDATLYVTFEPCVMCAGAMIHSRIGRVVFGQRNAKTGAAGSLMDVLHYPGMNHRVEITEGILADECAALLCYFFRMPRQVFNAQKKAQSSTD

SEQ ID NO: 60 - protein, 167 aa, Artificial Sequence
  Synthetic
MSEVEFSHEYWMRHALTLAKRARDEREVPVGAVLVLNNRVIGEGWNRAIGLHDPTAHAEIMALRQGGLVMQNYRLIDATLYVTFEPCVMCAGAMIHSRIGRVVFGMRNAKTGAAGSLMDVLHYPGMNHRVEITEGILADECAALLCYFFRMPRQVFNAQKKAQSSTD

SEQ ID NO: 61 - protein, 167 aa, Artificial Sequence
  Synthetic
MSEVEFSHEYWMRHALTLAKRARDEREVPVGAVLVLNNRVIGEGWNFAIGLHDPTAHAEIMALRQGGLVMQNYRLIDATLYVTFEPCVMCAGAMIHSRIGRVVFGVRNAKTGAAGSLMDVLHYPGMNHRVEITEGILADECAALLCYFFRMPRQVFNAQKKAQSSTD

SEQ ID NO: 62 - protein, 167 aa, Artificial Sequence
  Synthetic
MSEVEFSHEYWMRHALTLAKRARDEREVPVGAVLVLNNRVIGEGWNWAIGLHDPTAHAEIMALRQGGLVMQNYRLIDATLYVTFEPCVMCAGAMIHSRIGRVVFGVRNAKTGAAGSLMDVLHYPGMNHRVEITEGILADECAALLCYFFRMPRQVFNAQKKAQSSTD

SEQ ID NO: 63 - protein, 167 aa, Artificial Sequence
  Synthetic
MSEVEFSHEYWMRHALTLAKRARDEREVPVGAVLVLNNRVIGEGWNQAIGLHDPTAHAEIMALRQGGLVMQNYRLIDATLYVTFEPCVMCAGAMIHSRIGRVVFGVRNAKTGAAGSLMDVLHYPGMNHRVEITEGILADECAALLCYFFRMPRQVFNAQKKAQSSTD

SEQ ID NO: 64 - protein, 167 aa, Artificial Sequence
  Synthetic
MSEVEFSHEYWMRHALTLAKRARDEREVPVGAVLVLNNRVIGEGWNMAIGLHDPTAHAEIMALRQGGLVMQNYRLIDATLYVTFEPCVMCAGAMIHSRIGRVVFGVRNAKTGAAGSLMDVLHYPGMNHRVEITEGILADECAALLCYFFRMPRQVFNAQKKAQSSTD

SEQ ID NO: 65 - protein, 167 aa, Artificial Sequence
  Synthetic
MSEVEFSHEYWMRHALTLAKRAWDEREVPVGAVLVHNNRVIGEGWNRPIGRHDPTAHAQIMALRQGGLVMQNYRLIDATLYVTLEPCVMCAGAMIHSRIGRVVFGARDAKTGAAGSLMDVLHHPGMNHRVEITEGILADECAALLSDFFRMRRQEIKAQKKAQSSTD

SEQ ID NO: 66 - protein, 1803 aa, Artificial Sequence
  Synthetic
MKRTADGSEFESPKKKRKVSEVEFSHEYWMRHALTLAKRAWDEREVPVGAVLVHNNRVIGEGWNRPIGRHDPTAHAEIMALRQGGLVMQNYRLIDATLYVTLEPCVMCAGAMIHSRIGRVVFGARDAKTGAAGSLMDVLHHPGMNHRVEITEGILADECAALLSDFFRMRRQEIKAQKKAQSSTDSGGSSGGSSGSETPGTSESATPESSGGSSGGSSEVEFSHEYWMRHALTLAKRARDEREVPVGAVLVLNNRVIGEGWNRAIGLHDPTAHAEIMALRQGGLVMQNYRLIDATLYVTFEPCVMCAGAMIHSRIGRVVFGVRNAKTGAAGSLMDVLHYPGMNHRVEITEGILADECAALLCYFFRMPRQVFNAQKKAQSSTDSGGSSGGSSGSETPGTSESATPESSGGSSGGSDKKYSIGLAIGTNSVGWAVITDEYKVPSKKFKVLGNTDRHSIKKNLIGALLFDSGETAEATRLKRTARRRYTRRKNRICYLQEIFSNEMAKVDDSFFHRLEESFLVEEDKKHERHPIFGNIVDEVAYHEKYPTIYHLRKKLVDSTDKADLRLIYLALAHMIKFRGHFLIEGDLNPDNSDVDKLFIQLVQTYNQLFEENPINASGVDAKAILSARLSKSRRLENLIAQLPGEKKNGLFGNLIALSLGLTPNFKSNFDLAEDAKLQLSKDTYDDDLDNLLAQIGDQYADLFLAAKNLSDAILLSDILRVNTEITKAPLSASMIKRYDEHHQDLTLLKALVRQQLPEKYKEIFFDQSKNGYAGYIDGGASQEEFYKFIKPILEKMDGTEELLVKLNREDLLRKQRTFDNGSIPHQIHLGELHAILRRQEDFYPFLKDNREKIEKILTFRIPYYVGPLARGNSRFAWMTRKSEETITPWNFEEVVDKGASAQSFIERMTNFDKNLPNEKVLPKHSLLYEYFTVYNELTKVKYVTEGMRKPAFLSGEQKKAIVDLLFKTNRKVTVKQLKEDYFKKIECFDSVEISGVEDRFNASLGTYHDLLKIIKDKDFLDNEENEDILEDIVLTLTLFEDREMIEERLKTYAHLFDDKVMKQLKRRRYTGWGRLSRKLINGIRDKQSGKTILDFLKSDGFANRNFMQLIHDDSLTFKEDIQKAQVSGQGDSLHEHIANLAGSPAIKKGILQTVKVVDELVKVMGRHKPENIVIEMARENQTTQKGQKNSRERMKRIEEGIKELGSQILKEHPVENTQLQNEKLYLYYLQNGRDMYVDQELDINRLSDYDVDHIVPQSFLKDDSIDNKVLTRSDKNRGKSDNVPSEEVVKKMKNYWRQLLNAKLITQRKFDNLTKAERGGLSELDKAGFIKRQLVETRQITKHVAQILDSRMNTKYDENDKLIREVKVITLKSKLVSDFRKDFQFYKVREINNYHHAHDAYLNAVVGTALIKKYPKLESEFVYGDYKVYDVRKMIAKSEQEIGKATAKYFFYSNIMNFFKTEITLANGEIRKRPLIETNGETGEIVWDKGRDFATVRKVLSMPQVNIVKKTEVQTGGFSKESILPKRNSDKLIARKKDWDPKKYGGFVSPTVAYSVLVVAKVEKGKSKKLKSVKELLGITIMERSSFEKNPIDFLEAKGYKEVKKDLIIKLPKYSLFELENGRKRMLASARELQKGNELALPSKYVNFLYLASHYEKLKGSPEDNEQKQLFVEQHKHYLDEIIEQISEFSKRVILADANLDKVLSAYNKHRDKPIREQAENIIHLFTLTNLGAPAAFKYFDTTIDRKQYRSTKEVLDATLIHQSITGLYETRIDLSQLGGDSGGSKRTADGSEFEPKKKRKV

SEQ ID NO: 67 - protein, 1803 aa, Artificial Sequence
  Synthetic
MKRTADGSEFESPKKKRKVSEVEFSHEYWMRHALTLAKRAWDEREVPVGAVLVHNNRVIGEGWNRPIGRHDPTAHAEIMALRQGGLVMQNYRLIDATLYVTLEPCVMCAGAMIHSRIGRVVFGARDAKTGAAGSLMDVLHHPGMNHRVEITEGILADECAALLSDFFRMRRQEIKAQKKAQSSTDSGGSSGGSSGSETPGTSESATPESSGGSSGGSSEVEFSHEYWMRHALTLAKRARDEREVPVGAVLVLNNRVIGEGWNRAIGLHDPTAHAEIMALRQGGLVMQNYRLIDATLYVTFEPCVMCAGAMIHSRIGRVVFGVRNAKTGAAGSLMDVLHYPGMNHRVEITEGILADECAALLCYFFRMPRQVFNAQKKAQSSTDSGGSSGGSSGSETPGTSESATPESSGGSSGGSDKKYSIGLAIGTNSVGWAVITDEYKVPSKKFKVLGNTDRHSIKKNLIGALLFDSGETAEATRLKRTARRRYTRRKNRICYLQEIFSNEMAKVDDSFFHRLEESFLVEEDKKHERHPIFGNIVDEVAYHEKYPTIYHLRKKLVDSTDKADLRLIYLALAHMIKFRGHFLIEGDLNPDNSDVDKLFIQLVQTYNQLFEENPINASGVDAKAILSARLSKSRRLENLIAQLPGEKKNGLFGNLIALSLGLTPNFKSNFDLAEDTKLQLSKDTYDDDLDNLLAQIGDQYADLFLAAKNLSDAILLSDILRVNTEITKAPLSASMIKLYDEHHQDLTLLKALVRQQLPEKYKEIFFDQSKNGYAGYIDGGASQEEFYKFIKPILEKMDGTEELLVKLNREDLLRKQRTFDNGIIPHQIHLGELHAILRRQEDFYPFLKDNREKIEKILTFRIPYYVGPLARGNSRFAWMTRKSEETITPWNFEKVVDKGASAQSFIERMTNFDKNLPNEKVLPKHSLLYEYFTVYNELTKVKYVTEGMRKPAFLSGDQKKAIVDLLFKTNRKVTVKQLKEDYFKKIECFDSVEISGVEDRFNASLGTYHDLLKIIKDKDFLDNEENEDILEDIVLTLTLFEDREMIEERLKTYAHLFDDKVMKQLKRRRYTGWGRLSRKLINGIRDKQSGKTILDFLKSDGFANRNFIQLIHDDSLTFKEDIQKAQVSGQGDSLHEHIANLAGSPAIKKGILQTVKVVDELVKVMGRHKPENIVIEMARENQTTQKGQKNSRERMKRIEEGIKELGSQILKEHPVENTQLQNEKLYLYYLQNGRDMYVDQELDINRLSDYDVDHIVPQSFLKDDSIDNKVLTRSDKNRGKSDNVPSEEVVKKMKNYWRQLLNAKLITQRKFDNLTKAERGGLSELDKAGFIKRQLVETRQITKHVAQILDSRMNTKYDENDKLIREVKVITLKSKLVSDFRKDFQFYKVREINNYHHAHDAYLNAVVGTALIKKYPKLESEFVYGDYKVYDVRKMIAKSEQEIGKATAKYFFYSNIMNFFKTEITLANGEIRKRPLIETNGETGEIVWDKGRDFATVRKVLSMPQVNIVKKTEVQTGGFSKESILPKRNSDKLIARKKDWDPKKYGGFDSPTVAYSVLVVAKVEKGKSKKLKSVKELLGITIMERSSFEKNPIDFLEAKGYKEVKKDLIIKLPKYSLFELENGRKRMLASAGVLQKGNELALPSKYVNFLYLASHYEKLKGSPEDNEQKQLFVEQHKHYLDEIIEQISEFSKRVILADANLDKVLSAYNKHRDKPIREQAENIIHLFTLTNLGAPAAFKYFDTTIDRKRYTSTKEVLDATLIHQSITGLYETRIDLSQLGGDSGGSKRTADGSEFEPKKKRKV

SEQ ID NO: 68 - protein, 1802 aa, Artificial Sequence
  Synthetic
KRTADGSEFESPKKKRKVSEVEFSHEYWMRHALTLAKRAWDEREVPVGAVLVHNNRVIGEGWNRPIGRHDPTAHAEIMALRQGGLVMQNYRLIDATLYVTLEPCVMCAGAMIHSRIGRVVFGARDAKTGAAGSLMDVLHHPGMNHRVEITEGILADECAALLSDFFRMRRQEIKAQKKAQSSTDSGGSSGGSSGSETPGTSESATPESSGGSSGGSSEVEFSHEYWMRHALTLAKRARDEREVPVGAVLVLNNRVIGEGWNRAIGLHDPTAHAEIMALRQGGLVMQNYRLIDATLYVTFEPCVMCAGAMIHSRIGRVVFGVRNAKTGAAGSLMDVLHYPGMNHRVEITEGILADECAALLCYFFRMPRQVFNAQKKAQSSTDSGGSSGGSSGSETPGTSESATPESSGGSSGGSDKKYSIGLAIGTNSVGWAVITDEYKVPSKKFKVLGNTDRHSIKKNLIGALLFDSGETAEATRLKRTARRRYTRRKNRICYLQEIFSNEMAKVDDSFFHRLEESFLVEEDKKHERHPIFGNIVDEVAYHEKYPTIYHLRKKLVDSTDKADLRLIYLALAHMIKFRGHFLIEGDLNPDNSDVDKLFIQLVQTYNQLFEENPINASGVDAKAILSARLSKSRRLENLIAQLPGEKKNGLFGNLIALSLGLTPNFKSNFDLAEDTKLQLSKDTYDDDLDNLLAQIGDQYADLFLAAKNLSDAILLSDILRVNTEITKAPLSASMIKLYDEHHQDLTLLKALVRQQLPEKYKEIFFDQSKNGYAGYIDGGASQEEFYKFIKPILEKMDGTEELLVKLNREDLLRKQRTFDNGIIPHQIHLGELHAILRRQEDFYPFLKDNREKIEKILTFRIPYYVGPLARGNSRFAWMTRKSEETITPWNFEKVVDKGASAQSFIERMTNFDKNLPNEKVLPKHSLLYEYFTVYNELTKVKYVTEGMRKPAFLSGDQKKAIVDLLFKTNRKVTVKQLKEDYFKKIECFDSVEISGVEDRFNASLGTYHDLLKIIKDKDFLDNEENEDILEDIVLTLTLFEDREMIEERLKTYAHLFDDKVMKQLKRRRYTGWGRLSRKLINGIRDKQSGKTILDFLKSDGFANRNFIQLIHDDSLTFKEDIQKAQVSGQGDSLHEHIANLAGSPAIKKGILQTVKVVDELVKVMGRHKPENIVIEMARENQTTQKGQKNSRERMKRIEEGIKELGSQILKEHPVENTQLQNEKLYLYYLQNGRDMYVDQELDINRLSDYDVDHIVPQSFLKDDSIDNKVLTRSDKNRGKSDNVPSEEVVKKMKNYWRQLLNAKLITQRKFDNLTKAERGGLSELDKAGFIKRQLVETRQITKHVAQILDSRMNTKYDENDKLIREVKVITLKSKLVSDFRKDFQFYKVREINNYHHAHDAYLNAVVGTALIKKYPKLESEFVYGDYKVYDVRKMIAKSEQEIGKATAKYFFYSNIMNFFKTEITLANGEIRKRPLIETNGETGEIVWDKGRDFATVRKVLSMPQVNIVKKTEVQTGGFSKESILPKRNSDKLIARKKDWDPKKYGGFDSPTVAYSVLVVAKVEKGKSKKLKSVKELLGITIMERSSFEKNPIDFLEAKGYKEVKKDLIIKLPKYSLFELENGRKRMLASAGVLQKGNELALPSKYVNFLYLASHYEKLKGSPEDNEQKQLFVEQHKHYLDEIIEQISEFSKRVILADANLDKVLSAYNKHRDKPIREQAENIIHLFTLTNLGAPAAFKYFDTTIDRKRYTSTKEVLDATLIHQSITGLYETRIDLSQLGGDSGGSKRTADGSEFEPKKKRKV

SEQ ID NO: 69 - protein, 1803 aa, Artificial Sequence
  Synthetic
MKRTADGSEFESPKKKRKVSEVEFSHEYWMRHALTLAKRAWDEREVPVGAVLVHNNRVIGEGWNRPIGRHDPTAHAEIMALRQGGLVMQNYRLIDATLYVTLEPCVMCAGAMIHSRIGRVVFGARDAKTGAAGSLMDVLHHPGMNHRVEITEGILADECAALLSDFFRMRRQEIKAQKKAQSSTDSGGSSGGSSGSETPGTSESATPESSGGSSGGSSEVEFSHEYWMRHALTLAKRARDEREVPVGAVLVLNNRVIGEGWNRAIGLHDPTAHAEIMALRQGGLVMQNYRLIDATLYVTFEPCVMCAGAMIHSRIGRVVFGVRNAKTGAAGSLMDVLHYPGMNHRVEITEGILADECAALLCYFFRMPRQVFNAQKKAQSSTDSGGSSGGSSGSETPGTSESATPESSGGSSGGSDKKYSIGLAIGTNSVGWAVITDEYKVPSKKFKVLGNTDRHSIKKNLIGALLFDSGETAEATRLKRTARRRYTRRKNRICYLQEIFSNEMAKVDDSFFHRLEESFLVEEDKKHERHPIFGNIVDEVAYHEKYPTIYHLRKKLVDSTDKADLRLIYLALAHMIKFRGHFLIEGDLNPDNSDVDKLFIQLVQTYNQLFEENPINASGVDAKAILSARLSKSRRLENLIAQLPGEKKNGLFGNLIALSLGLTPNFKSNFDLAEDAKLQLSKDTYDDDLDNLLAQIGDQYADLFLAAKNLSDAILLSDILRVNTEITKAPLSASMIKRYDEHHQDLTLLKALVRQQLPEKYKEIFFDQSKNGYAGYIDGGASQEEFYKFIKPILEKMDGTEELLVKLNREDLLRKQRTFDNGSIPHQIHLGELHAILRRQEDFYPFLKDNREKIEKILTFRIPYYVGPLARGNSRFAWMTRKSEETITPWNFEEVVDKGASAQSFIERMTNFDKNLPNEKVLPKHSLLYEYFTVYNELTKVKYVTEGMRKPAFLSGEQKKAIVDLLFKTNRKVTVKQLKEDYFKKIECFDSVEISGVEDRFNASLGTYHDLLKIIKDKDFLDNEENEDILEDIVLTLTLFEDREMIEERLKTYAHLFDDKVMKQLKRRRYTGWGRLSRKLINGIRDKQSGKTILDFLKSDGFANRNFMQLIHDDSLTFKEDIQKAQVSGQGDSLHEHIANLAGSPAIKKGILQTVKVVDELVKVMGRHKPENIVIEMARENQTTQKGQKNSRERMKRIEEGIKELGSQILKEHPVENTQLQNEKLYLYYLQNGRDMYVDQELDINRLSDYDVDHIVPQSFLKDDSIDNKVLTRSDKNRGKSDNVPSEEVVKKMKNYWRQLLNAKLITQRKFDNLTKAERGGLSELDKAGFIKRQLVETRQITKHVAQILDSRMNTKYDENDKLIREVKVITLKSKLVSDFRKDFQFYKVREINNYHHAHDAYLNAVVGTALIKKYPKLESEFVYGDYKVYDVRKMIAKSEQEIGKATAKYFFYSNIMNFFKTEITLANGEIRKRPLIETNGETGEIVWDKGRDFATVRKVLSMPQVNIVKKTEVQTGGFSKESILPKRNSDKLIARKKDWDPKKYGGFVSPTVAYSVLVVAKVEKGKSKKLKSVKELLGITIMERSSFEKNPIDFLEAKGYKEVKKDLIIKLPKYSLFELENGRKRMLASARELQKGNELALPSKYVNFLYLASHYEKLKGSPEDNEQKQLFVEQHKHYLDEIIEQISEFSKRVILADANLDKVLSAYNKHRDKPIREQAENIIHLFTLTNLGAPAAFKYFDTTIDRKEYRSTKEVLDATLIHQSITGLYETRIDLSQLGGDSGGSKRTADGSEFEPKKKRKV

SEQ ID NO: 70 - protein, 1489 aa, Artificial Sequence
  Synthetic
MKRTADGSEFESPKKKRKVSEVEFSHEYWMRHALTLAKRAWDEREVPVGAVLVHNNRVIGEGWNRPIGRHDPTAHAEIMALRQGGLVMQNYRLIDATLYVTLEPCVMCAGAMIHSRIGRVVFGARDAKTGAAGSLMDVLHHPGMNHRVEITEGILADECAALLSDFFRMRRQEIKAQKKAQSSTDSGGSSGGSSGSETPGTSESATPESSGGSSGGSSEVEFSHEYWMRHALTLAKRARDEREVPVGAVLVLNNRVIGEGWNRAIGLHDPTAHAEIMALRQGGLVMQNYRLIDATLYVTFEPCVMCAGAMIHSRIGRVVFGVRNAKTGAAGSLMDVLHYPGMNHRVEITEGILADECAALLCYFFRMPRQVFNAQKKAQSSTDSGGSSGGSSGSETPGTSESATPESSGGSSGGSGKRNYILGLAIGITSVGYGIIDYETRDVIDAGVRLFKEANVENNEGRRSKRGARRLKRRRRHRIQRVKKLLFDYNLLTDHSELSGINPYEARVKGLSQKLSEEEFSAALLHLAKRRGVHNVNEVEEDTGNELSTKEQISRNSKALEEKYVAELQLERLKKDGEVRGSINRFKTSDYVKEAKQLLKVQKAYHQLDQSFIDTYIDLLETRRTYYEGPGEGSPFGWKDIKEWYEMLMGHCTYFPEELRSVKYAYNADLYNALNDLNNLVITRDENEKLEYYEKFQIIENVFKQKKKPTLKQIAKEILVNEEDIKGYRVTSTGKPEFTNLKVYHDIKDITARKEIIENAELLDQIAKILTIYQSSEDIQEELTNLNSELTQEEIEQISNLKGYTGTHNLSLKAINLILDELWHTNDNQIAIFNRLKLVPKKVDLSQQKEIPTTLVDDFILSPVVKRSFIQSIKVINAIIKKYGLPNDIIIELAREKNSKDAQKMINEMQKRNRQTNERIEEIIRTTGKENAKYLIEKIKLHDMQEGKCLYSLEAIPLEDLLNNPFNYEVDHIIPRSVSFDNSFNNKVLVKQEENSKKGNRTPFQYLSSSDSKISYETFKKHILNLAKGKGRISKTKKEYLLEERDINRFSVQKDFINRNLVDTRYATRGLMNLLRSYFRVNNLDVKVKSINGGFTSFLRRKWKFKKERNKGYKHHAEDALIIANADFIFKEWKKLDKAKKVMENQMFEEKQAESMPEIETEQEYKEIFITPHQIKHIKDFKDYKYSHRVDKKPNRELINDTLYSTRKDDKGNTLIVNNLNGLYDKDNDKLKKLINKSPEKLZMYHHDPQTYQKLKLIMEQYGDEKNPLYKYYEETGNYLTKYSKKDNGPVIKKIKYYGNKLNAHLDITDDYPNSRNKVVKLSLKPYRFDVYLDNGVYKFVTVKNLDVIKKENYYEVNSKCYEEAKKLKKISNQAEFIASFYNNDLIKINGELYRVIGVNNDLLNRIEVNMIDITYREYLENMNDKRPPRIIKTIASKTQSIKKYSTDILGNLYEVKSKKHPQIIKKGSGGSKRTADGSEFEPKKKRKV

SEQ ID NO: 71 - protein, 1489 aa, Artificial Sequence
  Synthetic
MKRTADGSEFESPKKKRKVSEVEFSHEYWMRHALTLAKRAWDEREVPVGAVLVHNNRVIGEGWNRPIGRHDPTAHAEIMALRQGGLVMQNYRLIDATLYVTLEPCVMCAGAMIHSRIGRVVFGARDAKTGAAGSLMDVLHHPGMNHRVEITEGILADECAALLSDFFRMRRQEIKAQKKAQSSTDSGGSSGGSSGSETPGTSESATPESSGGSSGGSSEVEFSHEYWMRHALTLAKRARDEREVPVGAVLVLNNRVIGEGWNRAIGLHDPTAHAEIMALRQGGLVMQNYRLIDATLYVTFEPCVMCAGAMIHSRIGRVVFGVRNAKTGAAGSLMDVLHYPGMNHRVEITEGILADECAALLCYFFRMPRQVFNAQKKAQSSTDSGGSSGGSSGSETPGTSESATPESSGGSSGGSGKRNYILGLAIGITSVGYGIIDYETRDVIDAGVRLFKEANVENNEGRRSKRGARRLKRRRRHRIQRVKKLLFDYNLLTDHSELSGINPYEARVKGLSQKLSEEEFSAALLHLAKRRGVHNVNEVEEDTGNELSTKEQISRNSKALEEKYVAELQLERLKKDGEVRGSINRFKTSDYVKEAKQLLKVQKAYHQLDQSFIDTYIDLLETRRTYYEGPGEGSPFGWKDIKEWYEMLMGHCTYFPEELRSVKYAYNADLYNALNDLNNLVITRDENEKLEYYEKFQIIENVFKQKKKPTLKQIAKEILVNEEDIKGYRVTSTGKPEFTNLKVYHDIKDITARKEIIENAELLDQIAKILTIYQSSEDIQEELTNLNSELTQEEIEQISNLKGYTGTHNLSLKAINLILDELWHTNDNQIAIFNRLKLVPKKVDLSQQKEIPTTLVDDFILSPVVKRSFIQSIKVINAIIKKYGLPNDIIIELAREKNSKDAQKMINEMQKRNRQTNERIEEIIRTTGKENAKYLIEKIKLHDMQEGKCLYSLEAIPLEDLLNNPFNYEVDHIIPRSVSFDNSFNNKVLVKQEENSKKGNRTPFQYLSSSDSKISYETFKKHILNLAKGKGRISKTKKEYLLEERDINRFSVQKDFINRNLVDTRYATRGLMNLLRSYFRVNNLDVKVKSINGGFTSFLRRKWKFKKERNKGYKHHAEDALIIANADFIFKEWKKLDKAKKVMENQMFEEKQAESMPEIETEQEYKEIFITPHQIKHIKDFKDYKYSHRVDKKPNRKLINDTLYSTRKDDKGNTLIVNNLNGLYDKDNDKLKKLINKSPEKLLMYHHDPQTYQKLKLIMEQYGDEKNPLYKYYEETGNYLTKYSKKDNGPVIKKIKYYGNKLNAHLDITDDYPNSRNKVVKLSLKPYRFDVYLDNGVYKFVTVKNLDVIKKENYYEVNSKCYEEAKKLKKISNQAEFIASFYKNDLIKINGELYRVIGVNNDLLNRIEVNMIDITYREYLENMNDKRPPHIIKTIASKTQSIKKYSTDILGNLYEVKSKKHPQIIKKGSGGSKRTADGSEFEPKKKRKV

SEQ ID NO: 72 - protein, 1687 aa, Artificial Sequence
  Synthetic
MKRTADGSEFESPKKKRKVSSETGPVAVDPTLRRRIEPHEFEVFFDPRELRKETCLLYEINWGGRHSIWRHTSQNTNKHVEVNFIEKFTTERYFCPNTRCSITWFLSWSPCGECSRAITEFLSRYPHVTLFIYIARLYHHADPRNRQGLRDLISSGVTIQIMTEQESGYCWRNFVNYSPSNEAHWPRYPHLWVRLYVLELYCIILGLPPCLNILRRKQPQLTFFTIALQSCHYQRLPPHILWATGLKSGGSSGGSSGSETPGTSESATPESSGGSSGGSDYKVYDVRKMIAKSEQEIGKATAKYFFYSNIMNFFKTEITLANGEIRKRPLIETNGETGEIVWDKGRDFATVRKVLSMPQVNIVKKTEVQTGGFSKESILPKRNSDKLIARKKDWDPKKYGGFDSPTVAYSVLVVAKVEKGKSKKLKSVKELLGITIMERSSFEKNPIDFLEAKGYKEVKKDLIIKLPKYSLFELENGRKRMLASAGELQKGNELALPSKYVNFLYLASHYEKLKGSPEDNEQKQLFVEQHKHYLDEIIEQISEFSKRVILADANLDKVLSAYNKHRDKPIREQAENIIHLFTLTNLGAPAAFKYFDTTIDRKRYTSTKEVLDATLIHQSITGLYETRIDLSQLGGDGGSGGSGGSGGSGGSGGSGGDKKYSIGLAIGTNSVGWAVITDEYKVPSKKFKVLGNTDRHSIKKNLIGALLFDSGETAEATRLKRTARRRYTRRKNRICYLQEIFSNEMAKVDDSFFHRLEESFLVEEDKKHERHPIFGNIVDEVAYHEKYPTIYHLRKKLVDSTDKADLRLIYLALAHMIKFRGHFLIEGDLNPDNSDVDKLFIQLVQTYNQLFEENPINASGVDAKAILSARLSKSRRLENLIAQLPGEKKNGLFGNLIALSLGLTPNFKSNFDLAEDAKLQLSKDTYDDDLDNLLAQIGDQYADLFLAAKNLSDAILLSDILRVNTEITKAPLSASMIKRYDEHHQDLTLLKALVRQQLPEKYKEIFFDQSKNGYAGYIDGGASQEEFYKFIKPILEKMDGTEELLVKLNREDLLRKQRTFDNGSIPHQIHLGELHAILRRQEDFYPFLKDNREKIEKILTFRIPYYVGPLARGNSRFAWMTRKSEETITPWNFEEVVDKGASAQSFIERMTNFDKNLPNEKVLPKHSLLYEYFTVYNELTKVKYVTEGMRKPAFLSGEQKKAIVDLLFKTNRKVTVKQLKEDYFKKIECFDSVEISGVEDRFNASLGTYHDLLKIIKDKDFLDNEENEDILEDIVLTLTLFEDREMIEERLKTYAHLFDDKVMKQLKRRRYTGWGRLSRKLINGIRDKQSGKTILDFLKSDGFANRNFMQLIHDDSLTFKEDIQKAQVSGQGDSLHEHIANLAGSPAIKKGILQTVKVVDELVKVMGRHKPENIVIEMARENQTTQKGQKNSRERMKRIEEGIKELGSQILKEHPVENTQLQNEKLYLYYLQNGRDMYVDQELDINRLSDYDVDHIVPQSFLKDDSIDNKVLTRSDKNRGKSDNVPSEEVVKKMKNYWRQLLNAKLITQRKFDNLTKAERGGLSELDKAGFIKRQLVETRQITKHVAQILDSRMNTKYDENDKLIREVKVITLKSKLVSDFRKDFQFYKVREINNYHHAHDAYLNAVVGTALIKKYPKLESEFVYGSGGSKRTADGSEFEPKKKRKV

SEQ ID NO: 73 - protein, 1688 aa, Artificial Sequence
  Synthetic
MKRTADGSEFESPKKKRKVSSETGPVAVDPTLRRRIEPHEFEVFFDPRELRKETCLLYEINWGGRHSIWRHTSQNTNKHVEVNFIEKFTTERYFCPNTRCSITWFLSWSPCGECSRAITEFLSRYPHVTLFIYIARLYHHADPRNRQGLRDLISSGVTIQIMTEQESGYCWRNFVNYSPSNEAHWPRYPHLWVRLYVLELYCIILGLPPCLNILRRKQPQLTFFTIALQSCHYQRLPPHILWATGLKSGGSSGGSSGSETPGTSESATPESSGGSSGGSEIGKATAKYFFYSNIMNFFKTEITLANGEIRKRPLIETNGETGEIVWDKGRDFATVRKVLSMPQVNIVKKTEVQTGGFSKESILPKRNSDKLIARKKDWDPKKYGGFDSPTVAYSVLVVAKVEKGKSKKLKSVKELLGITIMERSSFEKNPIDFLEAKGYKEVKKDLIIKLPKYSLFELENGRKRMLASAGELQKGNELALPSKYVNFLYLASHYEKLKGSPEDNEQKQLFVEQHKHYLDEIIEQISEFSKRVILADANLDKVLSAYNKHRDKPIREQAENIIHLFTLTNLGAPAAFKYFDTTIDRKRYTSTKEVLDATLIHQSITGLYETRIDLSQLGGDGGSGGSGGSGGSGGSGGSGGMDKKYSIGLAIGTNSVGWAVITDEYKVPSKKFKVLGNTDRHSIKKNLIGALLFDSGETAEATRLKRTARRRYTRRKNRICYLQEIFSNEMAKVDDSFFHRLEESFLVEEDKKHERHPIFGNIVDEVAYHEKYPTIYHLRKKLVDSTDKADLRLIYLALAHMIKFRGHFLIEGDLNPDNSDVDKLFIQLVQTYNQLFEENPINASGVDAKAILSARLSKSRRLENLIAQLPGEKKNGLFGNLIALSLGLTPNFKSNFDLAEDAKLQLSKDTYDDDLDNLLAQIGDQYADLFLAAKNLSDAILLSDILRVNTEITKAPLSASMIKRYDEHHQDLTLLKALVRQQLPEKYKEIFFDQSKNGYAGYIDGGASQEEFYKFIKPILEKMDGTEELLVKLNREDLLRKQRTFDNGSIPHQIHLGELHAILRRQEDFYPFLKDNREKIEKILTFRIPYYVGPLARGNSRFAWMTRKSEETITPWNFEEVVDKGASAQSFIERMTNFDKNLPNEKVLPKHSLLYEYFTVYNELTKVKYVTEGMRKPAFLSGEQKKAIVDLLFKTNRKVTVKQLKEDYFKKIECFDSVEISGVEDRFNASLGTYHDLLKIIKDKDFLDNEENEDILEDIVLTLTLFEDREMIEERLKTYAHLFDDKVMKQLKRRRYTGWGRLSRKLINGIRDKQSGKTILDFLKSDGFANRNFMQLIHDDSLTFKEDIQKAQVSGQGDSLHEHIANLAGSPAIKKGILQTVKVVDELVKVMGRHKPENIVIEMARENQTTQKGQKNSRERMKRIEEGIKELGSQILKEHPVENTQLQNEKLYLYYLQNGRDMYVDQELDINRLSDYDVDHIVPQSFLKDDSIDNKVLTRSDKNRGKSDNVPSEEVVKKMKNYWRQLLNAKLITQRKFDNLTKAERGGLSELDKAGFIKRQLVETRQITKHVAQILDSRMNTKYDENDKLIREVKVITLKSKLVSDFRKDFQFYKVREINNYHHAHDAYLNAVVGTALIKKYPKLESEFVYGDYKVYDVRKMIAKSEQSGGSKRTADGSEFEPKKKRKV

SEQ ID NO: 74 - protein, 1687 aa, Artificial Sequence
  Synthetic
MKRTADGSEFESPKKKRKVSSETGPVAVDPTLRRRIEPHEFEVFFDPRELRKETCLLYEINWGGRHSIWRHTSQNTNKHVEVNFIEKFTTERYFCPNTRCSITWFLSWSPCGECSRAITEFLSRYPHVTLFIYIARLYHHADPRNRQGLRDLISSGVTIQIMTEQESGYCWRNFVNYSPSNEAHWPRYPHLWVRLYVLELYCIILGLPPCLNILRRKQPQLTFFTIALQSCHYQRLPPHILWATGLKSGGSSGGSSGSETPGTSESATPESSGGSSGGSNIMNFFKTEITLANGEIRKRPLIETNGETGEIVWDKGRDFATVRKVLSMPQVNIVKKTEVQTGGFSKESILPKRNSDKLIARKKDWDPKKYGGFDSPTVAYSVLVVAKVEKGKSKKLKSVKELLGITIMERSSFEKNPIDFLEAKGYKEVKKDLIIKLPKYSLFELENGRKRMLASAGELQKGNELALPSKYVNFLYLASHYEKLKGSPEDNEQKQLFVEQHKHYLDEIIEQISEFSKRVILADANLDKVLSAYNKHRDKPIREQAENIIHLFTLTNLGAPAAFKYFDTTIDRKRYTSTKEVLDATLIHQSITGLYETRIDLSQLGGDGGSGGSGGSGGSGGSGGSGGDKKYSIGLAIGTNSVGWAVITDEYKVPSKKFKVLGNTDRHSIKKNLIGALLFDSGETAEATRLKRTARRRYTRRKNRICYLQEIFSNEMAKVDDSFFHRLEESFLVEEDKKHERHPIFGNIVDEVAYHEKYPTIYHLRKKLVDSTDKADLRLIYLALAHMIKFRGHFLIEGDLNPDNSDVDKLFIQLVQTYNQLFEENPINASGVDAKAILSARLSKSRRLENLIAQLPGEKKNGLFGNLIALSLGLTPNFKSNFDLAEDAKLQLSKDTYDDDLDNLLAQIGDQYADLFLAAKNLSDAILLSDILRVNTEITKAPLSASMIKRYDEHHQDLTLLKALVRQQLPEKYKEIFFDQSKNGYAGYIDGGASQEEFYKFIKPILEKMDGTEELLVKLNREDLLRKQRTFDNGSIPHQIHLGELHAILRRQEDFYPFLKDNREKIEKILTFRIPYYVGPLARGNSRFAWMTRKSEETITPWNFEEVVDKGASAQSFIERMTNFDKNLPNEKVLPKHSLLYEYFTVYNELTKVKYVTEGMRKPAFLSGEQKKAIVDLLFKTNRKVTVKQLKEDYFKKIECFDSVEISGVEDRFNASLGTYHDLLKIIKDKDFLDNEENEDILEDIVLTLTLFEDREMIEERLKTYAHLFDDKVMKQLKRRRYTGWGRLSRKLINGIRDKQSGKTILDFLKSDGFANRNFMQLIHDDSLTFKEDIQKAQVSGQGDSLHEHIANLAGSPAIKKGILQTVKVVDELVKVMGRHKPENIVIEMARENQTTQKGQKNSRERMKRIEEGIKELGSQILKEHPVENTQLQNEKLYLYYLQNGRDMYVDQELDINRLSDYDVDHIVPQSFLKDDSIDNKVLTRSDKNRGKSDNVPSEEVVKKMKNYWRQLLNAKLITQRKFDNLTKAERGGLSELDKAGFIKRQLVETRQITKHVAQILDSRMNTKYDENDKLIREVKVITLKSKLVSDFRKDFQFYKVREINNYHHAHDAYLNAVVGTALIKKYPKLESEFVYGDYKVYDVRKMIAKSEQEIGKATAKYFFYSSGGSKRTADGSEFEPKKKRKV

SEQ ID NO: 75 - protein, 1688 aa, Artificial Sequence
  Synthetic
MKRTADGSEFESPKKKRKVSSETGPVAVDPTLRRRIEPHEFEVFFDPRELRKETCLLYEINWGGRHSIWRHTSQNTNKHVEVNFIEKFTTERYFCPNTRCSITWFLSWSPCGECSRAITEFLSRYPHVTLFIYIARLYHHADPRNRQGLRDLISSGVTIQIMTEQESGYCWRNFVNYSPSNEAHWPRYPHLWVRLYVLELYCIILGLPPCLNILRRKQPQLTFFTIALQSCHYQRLPPHILWATGLKSGGSSGGSSGSETPGTSESATPESSGGSSGGSPEDNEQKQLFVEQHKHYLDEIIEQISEFSKRVILADANLDKVLSAYNKHRDKPIREQAENIIHLFTLTNLGAPAAFKYFDTTIDRKRYTSTKEVLDATLIHQSITGLYETRIDLSQLGGDGGSGGSGGSGGSGGSGGSGGMDKKYSIGLAIGTNSVGWAVITDEYKVPSKKFKVLGNTDRHSIKKNLIGALLFDSGETAEATRLKRTARRRYTRRKNRICYLQEIFSNEMAKVDDSFFHRLEESFLVEEDKKHERHPIFGNIVDEVAYHEKYPTIYHLRKKLVDSTDKADLRLIYLALAHMIKFRGHFLIEGDLNPDNSDVDKLFIQLVQTYNQLFEENPINASGVDAKAILSARLSKSRRLENLIAQLPGEKKNGLFGNLIALSLGLTPNFKSNFDLAEDAKLQLSKDTYDDDLDNLLAQIGDQYADLFLAAKNLSDAILLSDILRVNTEITKAPLSASMIKRYDEHHQDLTLLKALVRQQLPEKYKEIFFDQSKNGYAGYIDGGASQEEFYKFIKPILEKMDGTEELLVKLNREDLLRKQRTFDNGSIPHQIHLGELHAILRRQEDFYPFLKDNREKIEKILTFRIPYYVGPLARGNSRFAWMTRKSEETITPWNFEEVVDKGASAQSFIERMTNFDKNLPNEKVLPKHSLLYEYFTVYNELTKVKYVTEGMRKPAFLSGEQKKAIVDLLFKTNRKVTVKQLKEDYFKKIECFDSVEISGVEDRFNASLGTYHDLLKIIKDKDFLDNEENEDILEDIVLTLTLFEDREMIEERLKTYAHLFDDKVMKQLKRRRYTGWGRLSRKLINGIRDKQSGKTILDFLKSDGFANRNFMQLIHDDSLTFKEDIQKAQVSGQGDSLHEHIANLAGSPAIKKGILQTVKVVDELVKVMGRHKPENIVIEMARENQTTQKGQKNSRERMKRIEEGIKELGSQILKEHPVENTQLQNEKLYLYYLQNGRDMYVDQELDINRLSDYDVDHIVPQSFLKDDSIDNKVLTRSDKNRGKSDNVPSEEVVKKMKNYWRQLLNAKLITQRKFDNLTKAERGGLSELDKAGFIKRQLVETRQITKHVAQILDSRMNTKYDENDKLIREVKVITLKSKLVSDFRKDFQFYKVREINNYHHAHDAYLNAVVGTALIKKYPKLESEFVYGDYKVYDVRKMIAKSEQEIGKATAKYFFYSNIMNFFKTEITLANGEIRKRPLIETNGETGEIVWDKGRDFATVRKVLSMPQVNIVKKTEVQTGGFSKESILPKRNSDKLIARKKDWDPKKYGGFDSPTVAYSVLVVAKVEKGKSKKLKSVKELLGITIMERSSFEKNPIDFLEAKGYKEVKKDLIIKLPKYSLFELENGRKRMLASAGELQKGNELALPSKYVNFLYLASHYEKLKGSSGGSKRTADGSEFEPKKKRKV

SEQ ID NO: 76 - protein, 1687 aa, Artificial Sequence
  Synthetic
MKRTADGSEFESPKKKRKVSSETGPVAVDPTLRRRIEPHEFEVFFDPRELRKETCLLYEINWGGRHSIWRHTSQNTNKHVEVNFIEKFTTERYFCPNTRCSITWFLSWSPCGECSRAITEFLSRYPHVTLFIYIARLYHHADPRNRQGLRDLISSGVTIQIMTEQESGYCWRNFVNYSPSNEAHWPRYPHLWVRLYVLELYCIILGLPPCLNILRRKQPQLTFFTIALQSCHYQRLPPHILWATGLKSGGSSGGSSGSETPGTSESATPESSGGSSGGSKPIREQAENIIHLFTLTNLGAPAAFKYFDTTIDRKRYTSTKEVLDATLIHQSITGLYETRIDLSQLGGDGGSGGSGGSGGSGGSGGSGGDKKYSIGLAIGTNSVGWAVITDEYKVPSKKFKVLGNTDRHSIKKNLIGALLFDSGETAEATRLKRTARRRYTRRKNRICYLQEIFSNEMAKVDDSFFHRLEESFLVEEDKKHERHPIFGNIVDEVAYHEKYPTIYHLRKKLVDSTDKADLRLIYLALAHMIKFRGHFLIEGDLNPDNSDVDKLFIQLVQTYNQLFEENPINASGVDAKAILSARLSKSRRLENLIAQLPGEKKNGLFGNLIALSLGLTPNFKSNFDLAEDAKLQLSKDTYDDDLDNLLAQIGDQYADLFLAAKNLSDAILLSDILRVNTEITKAPLSASMIKRYDEHHQDLTLLKALVRQQLPEKYKEIFFDQSKNGYAGYIDGGASQEEFYKFIKPILEKMDGTEELLVKLNREDLLRKQRTFDNGSIPHQIHLGELHAILRRQEDFYPFLKDNREKIEKILTFRIPYYVGPLARGNSRFAWMTRKSEETITPWNFEEVVDKGASAQSFIERMTNFDKNLPNEKVLPKHSLLYEYFTVYNELTKVKYVTEGMRKPAFLSGEQKKAIVDLLFKTNRKVTVKQLKEDYFKKIECFDSVEISGVEDRFNASLGTYHDLLKIIKDKDFLDNEENEDILEDIVLTLTLFEDREMIEERLKTYAHLFDDKVMKQLKRRRYTGWGRLSRKLINGIRDKQSGKTILDFLKSDGFANRNFMQLIHDDSLTFKEDIQKAQVSGQGDSLHEHIANLAGSPAIKKGILQTVKVVDELVKVMGRHKPENIVIEMARENQTTQKGQKNSRERMKRIEEGIKELGSQILKEHPVENTQLQNEKLYLYYLQNGRDMYVDQELDINRLSDYDVDHIVPQSFLKDDSIDNKVLTRSDKNRGKSDNVPSEEVVKKMKNYWRQLLNAKLITQRKFDNLTKAERGGLSELDKAGFIKRQLVETRQITKHVAQILDSRMNTKYDENDKLIREVKVITLKSKLVSDFRKDFQFYKVREINNYHHAHDAYLNAVVGTALIKKYPKLESEFVYGDYKVYDVRKMIAKSEQEIGKATAKYFFYSNIMNFFKTEITLANGEIRKRPLIETNGETGEIVWDKGRDFATVRKVLSMPQVNIVKKTEVQTGGFSKESILPKRNSDKLIARKKDWDPKKYGGFDSPTVAYSVLVVAKVEKGKSKKLKSVKELLGITIMERSSFEKNPIDFLEAKGYKEVKKDLIIKLPKYSLFELENGRKRMLASAGELQKGNELALPSKYVNFLYLASHYEKLKGSPEDNEQKQLFVEQHKHYLDEIIEQISEFSKRVILADANLDKVLSAYNKHRDSGGSKRTADGSEFEPKKKRKV

SEQ ID NO: 77 - protein, 1823 aa, Artificial Sequence
  Synthetic
MKRTADGSEFESPKKKRKVSEVEFSHEYWMRHALTLAKRAWDEREVPVGAVLVHNNRVIGEGWNRPIGRHDPTAHAEIMALRQGGLVMQNYRLIDATLYVTLEPCVMCAGAMIHSRIGRVVFGARDAKTGAAGSLMDVLHHPGMNHRVEITEGILADECAALLSDFFRMRRQEIKAQKKAQSSTDSGGSSGGSSGSETPGTSESATPESSGGSSGGSSEVEFSHEYWMRHALTLAKRARDEREVPVGAVLVLNNRVIGEGWNRAIGLHDPTAHAEIMALRQGGLVMQNYRLIDATLYVTFEPCVMCAGAMIHSRIGRVVFGVRNAKTGAAGSLMDVLHYPGZNHRVEITEGILADECAALLCYFFRMPRQVFNAQKKAQSSTDSGGSSGGSSGSETPGTSESATPESSGGSSGGSDYKVYDVRKMIAKSEQEIGKATAKYFFYSNIMNFFKTEITLANGEIRKRPLIETNGETGEIVWDKGRDFATVRKVLSMPQVNIVKKTEVQTGGFSKESILPKRNSDKLIARKKDWDPKKYGGFDSPTVAYSVLVVAKVEKGKSKKLKSVKELLGITIMERSSFEKNPIDFLEAKGYKEVKKDLIIKLPKYSLFELENGRKRMLASAGELQKGNELALPSKYVNFLYLASHYEKLKGSPEDNEQKQLFVEQHKHYLDEIIEQISEFSKRVILADANLDKVLSAYNKHRDKPIREQAENIIHLFTLTNLGAPAAFKYFDTTIDRKRYTSTKEVLDATLIHQSITGLYETRIDLSQLGGDGGSGGSGGSGGSGGSGGSGGDKKYSIGLAIGTNSVGWAVITDEYKVPSKKFKVLGNTDRHSIKKNLIGALLFDSGETAEATRLKRTARRRYTRRKNRICYLQEIFSNEMAKVDDSFFHRLEESFLVEEDKKHERHPIFGNIVDEVAYHEKYPTIYHLRKKLVDSTDKADLRLIYLALAHMIKFRGHFLIEGDLNPDNSDVDKLFIQLVQTYNQLFEENPINASGVDAKAILSARLSKSRRLENLIAQLPGEKKNGLFGNLIALSLGLTPNFKSNFDLAEDAKLQLSKDTYDDDLDNLLAQIGDQYADLFLAAKNLSDAILLSDILRVNTEITKAPLSASMIKRYDEHHQDLTLLKALVRQQLPEKYKEIFFDQSKNGYAGYIDGGASQEEFYKFIKPILEKMDGTEELLVKLNREDLLRKQRTFDNGSIPHQIHLGELHAILRRQEDFYPFLKDNREKIEKILTFRIPYYVGPLARGNSRFAWMTRKSEETITPWNFEEVVDKGASAQSFIERMTNFDKNLPNEKVLPKHSLLYEYFTVYNELTKVKYVTEGMRKPAFLSGEQKKAIVDLLFKTNRKVTVKQLKEDYFKKIECFDSVEISGVEDRFNASLGTYHDLLKIIKDKDFLDNEENEDILEDIVLTLTLFEDREMIEERLKTYAHLFDDKVMKQLKRRRYTGWGRLSRKLINGIRDKQSGKTILDFLKSDGFANRNFMQLIHDDSLTFKEDIQKAQVSGQGDSLHEHIANLAGSPAIKKGILQTVKVVDELVKVMGRHKPENIVIEMARENQTTQKGQKNSRERMKRIEEGIKELGSQILKEHPVENTQLQNEKLYLYYLQNGRDMYVDQELDINRLSDYDVDHIVPQSFLKDDSIDNKVLTRSDKNRGKSDNVPSEEVVKKMKNYWRQLLNAKLITQRKFDNLTKAERGGLSELDKAGFIKRQLVETRQITKHVAQILDSRMNTKYDENDKLIREVKVITLKSKLVSDFRKDFQFYKVREINNYHHAHDAYLNAVVGTALIKKYPKLESEFVYGSGGSKRTADGSEFEPKKKRKV

SEQ ID NO: 78 - protein, 1824 aa, Artificial Sequence
  Synthetic
MKRTADGSEFESPKKKRKVSEVEFSHEYWMRHALTLAKRAWDEREVPVGAVLVHNNRVIGEGWNRPIGRHDPTAHAEIMALRQGGLVMQNYRLIDATLYVTLEPCVMCAGAMIHSRIGRVVFGARDAKTGAAGSLMDVLHHPGMNHRVEITEGILADECAALLSDFFRMRRQEIKAQKKAQSSTDSGGSSGGSSGSETPGTSESATPESSGGSSGGSSEVEFSHEYWMRHALTLAKRARDEREVPVGAVLVLNNRVIGEGWNRAIGLHDPTAHAEIMALRQGGLVMQNYRLIDATLYVTFEPCVMCAGAMIHSRIGRVVFGVRNAKTGAAGSLMDVLHYPGMNHRVEITEGILADECAALLCYFFRMPRQVFNAQKKAQSSTDSGGSSGGSSGSETPGTSESATPESSGGSSGGSEIGKATAKYFFYSNIMNFFKTEITLANGEIRKRPLIETNGETGEIVWDKGRDFATVRKVLSMPQVNIVKKTEVQTGGFSKESILPKRNSDKLIARKKDWDPKKYGGFDSPTVAYSVLVVAKVEKGKSKKLKSVKELLGITIMERSSFEKNPIDFLEAKGYKEVKKDLIIKLPKYSLFELENGRKRMLASAGELQKGNELALPSKYVNFLYLASHYEKLKGSPEDNEQKQLFVEQHKHYLDEIIEQISEFSKRVILADANLDKVLSAYNKHRDKPIREQAENIIHLFTLTNLGAPAAFKYFDTTIDRKRYTSTKEVLDATLIHQSITGLYETRIDLSQLGGDGGSGGSGGSGGSGGSGGSGGMDKKYSIGLAIGTNSVGWAVITDEYKVPSKKFKVLGNTDRHSIKKNLIGALLFDSGETAEATRLKRTARRRYTRRKNRICYLQEIFSNEMAKVDDSFFHRLEESFLVEEDKKHERHPIFGNIVDEVAYHEKYPTIYHLRKKLVDSTDKADLRLIYLALAHMIKFRGHFLIEGDLNPDNSDVDKLFIQLVQTYNQLFEENPINASGVDAKAILSARLSKSRRLENLIAQLPGEKKNGLFGNLIALSLGLTPNFKSNFDLAEDAKLQLSKDTYDDDLDNLLAQIGDQYADLFLAAKNLSDAILLSDILRVNTEITKAPLSASMIKRYDEHHQDLTLLKALVRQQLPEKYKEIFFDQSKNGYAGYIDGGASQEEFYKFIKPILEKMDGTEELLVKLNREDLLRKQRTFDNGSIPHQIHLGELHAILRRQEDFYPFLKDNREKIEKILTFRIPYYVGPLARGNSRFAWMTRKSEETITPWNFEEVVDKGASAQSFIERMTNFDKNLPNEKVLPKHSLLYEYFTVYNELTKVKYVTEGMRKPAFLSGEQKKAIVDLLFKTNRKVTVKQLKEDYFKKIECFDSVEISGVEDRFNASLGTYHDLLKIIKDKDFLDNEENEDILEDIVLTLTLFEDREMIEERLKTYAHLFDDKVMKQLKRRRYTGWGRLSRKLINGIRDKQSGKTILDFLKSDGFANRNFMQLIHDDSLTFKEDIQKAQVSGQGDSLHEHIANLAGSPAIKKGILQTVKVVDELVKVMGRHKPENIVIEMARENQTTQKGQKNSRERMKRIEEGIKELGSQILKEHPVENTQLQNEKLYLYYLQNGRDMYVDQELDINRLSDYDVDHIVPQSFLKDDSIDNKVLTRSDKNRGKSDNVPSEEVVKKMKNYWRQLLNAKLITQRKFDNLTKAERGGLSELDKAGFIKRQLVETRQITKHVAQILDSRMNTKYDENDKLIREVKVITLKSKLVSDFRKDFQFYKVREINNYHHAHDAYLNAVVGTALIKKYPKLESEFVYGDYKVYDVRKMIAKSEQSGGSKRTADGSEFEPKKKRKV

SEQ ID NO: 79 - protein, 1823 aa, Artificial Sequence
  Synthetic
MKRTADGSEFESPKKKRKVSEVEFSHEYWMRHALTLAKRAWDEREVPVGAVLVHNNRVIGEGWNRPIGRHDPTAHAEIMALRQGGLVMQNYRLIDATLYVTLEPCVMCAGAMIHSRIGRVVFGARDAKTGAAGSLMDVLHHPGMNHRVEITEGILADECAALLSDFFRMRRQEIKAQKKAQSSTDSGGSSGGSSGSETPGTSESATPESSGGSSGGSSEVEFSHEYWMRHALTLAKRARDEREVPVGAVLVLNNRVIGEGWNRAIGLHDPTAHAEIMALRQGGLVMQNYRLIDATLYVTFEPCVMCAGAMIHSRIGRVVFGVRNAKTGAAGSLMDVLHYPGMNHRVEITEGILADECAALLCYFFRMPRQVFNAQKKAQSSTDSGGSSGGSSGSETPGTSESATPESSGGSSGGSNIMNFFKTEITLANGEIRKRPLIETNGETGEIVWDKGRDFATVRKVLSMPQVNIVKKTEVQTGGFSKESILPKRNSDKLIARKKDWDPKKYGGFDSPTVAYSVLVVAKVEKGKSKKLKSVKELLGITIMERSSFEKNPIDFLEAKGYKEVKKDLIIKLPKYSLFELENGRKRMLASAGELQKGNELALPSKYVNFLYLASHYEKLKGSPEDNEQKQLFVEQHKHYLDEIIEQISEFSKRVILADANLDKVLSAYNKHRDKPIREQAENIIHLFTLTNLGAPAAFKYFDTTIDRKRYTSTKEVLDATLIHQSITGLYETRIDLSQLGGDGGSGGSGGSGGSGGSGGSGGDKKYSIGLAIGTNSVGWAVITDEYKVPSKKFKVLGNTDRHSIKKNLIGALLFDSGETAEATRLKRTARRRYTRRKNRICYLQEIFSNEMAKVDDSFFHRLEESFLVEEDKKHERHPIFGNIVDEVAYHEKYPTIYHLRKKLVDSTDKADLRLIYLALAHMIKFRGHFLIEGDLNPDNSDVDKLFIQLVQTYNQLFEENPINASGVDAKAILSARLSKSRRLENLIAQLPGEKKNGLFGNLIALSLGLTPNFKSNFDLAEDAKLQLSKDTYDDDLDNLLAQIGDQYADLFLAAKNLSDAILLSDILRVNTEITKAPLSASMIKRYDEHHQDLTLLKALVRQQLPEKYKEIFFDQSKNGYAGYIDGGASQEEFYKFIKPILEKMDGTEELLVKLNREDLLRKQRTFDNGSIPHQIHLGELHAILRRQEDFYPFLKDNREKIEKILTFRIPYYVGPLARGNSRFAWMTRKSEETITPWNFEEVVDKGASAQSFIERMTNFDKNLPNEKVLPKHSLLYEYFTVYNELTKVKYVTEGMRKPAFLSGEQKKAIVDLLFKTNRKVTVKQLKEDYFKKIECFDSVEISGVEDRFNASLGTYHDLLKIIKDKDFLDNEENEDILEDIVLTLTLFEDREMIEERLKTYAHLFDDKVMKQLKRRRYTGWGRLSRKLINGIRDKQSGKTILDFLKSDGFANRNFMQLIHDDSLTFKEDIQKAQVSGQGDSLHEHIANLAGSPAIKKGILQTVKVVDELVKVMGRHKPENIVIEMARENQTTQKGQKNSRERMKRIEEGIKELGSQILKEHPVENTQLQNEKLYLYYLQNGRDMYVDQELDINRLSDYDVDHIVPQSFLKDDSIDNKVLTRSDKNRGKSDNVPSEEVVKKMKNYWRQLLNAKLITQRKFDNLTKAERGGLSELDKAGFIKRQLVETRQITKHVAQILDSRMNTKYDENDKLIREVKVITLKSKLVSDFRKDFQFYKVREINNYHHAHDAYLNAVVGTALIKKYPKLESEFVYGDYKVYDVRKMIAKSEQEIGKATAKYFFYSSGGSKRTADGSEFEPKKKRKV

SEQ ID NO: 80 - protein, 1824 aa, Artificial Sequence
  Synthetic
MKRTADGSEFESPKKKRKVSEVEFSHEYWMRHALTLAKRAWDEREVPVGAVLVHNNRVIGEGWNRPIGRHDPTAHAEIMALRQGGLVMQNYRLIDATLYVTLEPCVMCAGAMIHSRIGRVVFGARDAKTGAAGSLMDVLHHPGMNHRVEITEGILADECAALLSDFFRMRRQEIKAQKKAQSSTDSGGSSGGSSGSETPGTSESATPESSGGSSGGSSEVEFSHEYWMRHALTLAKRARDEREVPVGAVLVLNNRVIGEGWNRAIGLHDPTAHAEIMALRQGGLVMQNYRLIDATLYVTFEPCVMCAGAMIHSRIGRVVFGVRNAKTGAAGSLMDVLHYPGMNHRVEITEGILADECAALLCYFFRMPRQVFNAQKKAQSSTDSGGSSGGSSGSETPGTSESATPESSGGSSGGSPEDNEQKQLFVEQHKHYLDEIIEQISEFSKRVILADANLDKVLSAYNKHRDKPIREQAENIIHLFTLTNLGAPAAFKYFDTTIDRKRYTSTKEVLDATLIHQSITGLYETRIDLSQLGGDGGSGGSGGSGGSGGSGGSGGMDKKYSIGLAIGTNSVGWAVITDEYKVPSKKFKVLGNTDRHSIKKNLIGALLFDSGETAEATRLKRTARRRYTRRKNRICYLQEIFSNEMAKVDDSFFHRLEESFLVEEDKKHERHPIFGNIVDEVAYHEKYPTIYHLRKKLVDSTDKADLRLIYLALAHMIKFRGHFLIEGDLNPDNSDVDKLFIQLVQTYNQLFEENPINASGVDAKAILSARLSKSRRLENLIAQLPGEKKNGLFGNLIALSLGLTPNFKSNFDLAEDAKLQLSKDTYDDDLDNLLAQIGDQYADLFLAAKNLSDAILLSDILRVNTEITKAPLSASMIKRYDEHHQDLTLLKALVRQQLPEKYKEIFFDQSKNGYAGYIDGGASQEEFYKFIKPILEKMDGTEELLVKLNREDLLRKQRTFDNGSIPHQIHLGELHAILRRQEDFYPFLKDNREKIEKILTFRIPYYVGPLARGNSRFAWMTRKSEETITPWNFEEVVDKGASAQSFIERMTNFDKNLPNEKVLPKHSLLYEYFTVYNELTKVKYVTEGMRKPAFLSGEQKKAIVDLLFKTNRKVTVKQLKEDYFKKIECFDSVEISGVEDRFNASLGTYHDLLKIIKDKDFLDNEENEDILEDIVLTLTLFEDREMIEERLKTYAHLFDDKVMKQLKRRRYTGWGRLSRKLINGIRDKQSGKTILDFLKSDGFANRNFMQLIHDDSLTFKEDIQKAQVSGQGDSLHEHIANLAGSPAIKKGILQTVKVVDELVKVMGRHKPENIVIEMARENQTTQKGQKNSRERMKRIEEGIKELGSQILKEHPVENTQLQNEKLYLYYLQNGRDMYVDQELDINRLSDYDVDHIVPQSFLKDDSIDNKVLTRSDKNRGKSDNVPSEEVVKKMKNYWRQLLNAKLITQRKFDNLTKAERGGLSELDKAGFIKRQLVETRQITKHVAQILDSRMNTKYDENDKLIREVKVITLKSKLVSDFRKDFQFYKVREINNYHHAHDAYLNAVVGTALIKKYPKLESEFVYGDYKVYDVRKMIAKSEQEIGKATAKYFFYSNIMNFFKTEITLANGEIRKRPLIETNGETGEIVWDKGRDFATVRKVLSMPQVNIVKKTEVQTGGFSKESILPKRNSDKLIARKKDWDPKKYGGFDSPTVAYSVLVVAKVEKGKSKKLKSVKELLGITIMERSSFEKNPIDFLEAKGYKEVKKDLIIKLPKYSLFELENGRKRMLASAGELQKGNELALPSKYVNFLYLASHYEKLKGSSGGSKRTADGSEFEPKKKRKV

SEQ ID NO: 81 - protein, 1823 aa, Artificial Sequence
  Synthetic
MKRTADGSEFESPKKKRKVSEVEFSHEYWMRHALTLAKRAWDEREVPVGAVLVHNNRVIGEGWNRPIGRHDPTAHAEIMALRQGGLVMQNYRLIDATLYVTLEPCVMCAGAMIHSRIGRVVFGARDAKTGAAGSLMDVLHHPGMNHRVEITEGILADECAALLSDFFRMRRQEIKAQKKAQSSTDSGGSSGGSSGSETPGTSESATPESSGGSSGGSSEVEFSHEYWMRHALTLAKRARDEREVPVGAVLVLNNRVIGEGWNRAIGLHDPTAHAEIMALRQGGLVMQNYRLIDATLYVTFEPCVMCAGAMIHSRIGRVVFGVRNAKTGAAGSLMDVLHYPGMNHRVEITEGILADECAALLCYFFRMPRQVFNAQKKAQSSTDSGGSSGGSSGSETPGTSESATPESSGGSSGGSKPIREQAENIIHLFTLTNLGAPAAFKYFDTTIDRKRYTSTKEVLDATLIHQSITGLYETRIDLSQLGGDGGSGGSGGSGGSGGSGGSGGDKKYSIGLAIGTNSVGWAVITDEYKVPSKKFKVLGNTDRHSIKKNLIGALLFDSGETAEATRLKRTARRRYTRRKNRICYLQEIFSNEMAKVDDSFFHRLEESFLVEEDKKHERHPIFGNIVDEVAYHEKYPTIYHLRKKLVDSTDKADLRLIYLALAHMIKFRGHFLIEGDLNPDNSDVDKLFIQLVQTYNQLFEENPINASGVDAKAILSARLSKSRRLENLIAQLPGEKKNGLFGNLIALSLGLTPNFKSNFDLAEDAKLQLSKDTYDDDLDNLLAQIGDQYADLFLAAKNLSDAILLSDILRVNTEITKAPLSASMIKRYDEHHQDLTLLKALVRQQLPEKYKEIFFDQSKNGYAGYIDGGASQEEFYKFIKPILEKMDGTEELLVKLNREDLLRKQRTFDNGSIPHQIHLGELHAILRRQEDFYPFLKDNREKIEKILTFRIPYYVGPLARGNSRFAWMTRKSEETITPWNFEEVVDKGASAQSFIERMTNFDKNLPNEKVLPKHSLLYEYFTVYNELTKVKYVTEGMRKPAFLSGEQKKAIVDLLFKTNRKVTVKQLKEDYFKKIECFDSVEISGVEDRFNASLGTYHDLLKIIKDKDFLDNEENEDILEDIVLTLTLFEDREMIEERLKTYAHLFDDKVMKQLKRRRYTGWGRLSRKLINGIRDKQSGKTILDFLKSDGFANRNFMQLIHDDSLTFKEDIQKAQVSGQGDSLHEHIANLAGSPAIKKGILQTVKVVDELVKVMGRHKPENIVIEMARENQTTQKGQKNSRERMKRIEEGIKELGSQILKEHPVENTQLQNEKLYLYYLQNGRDMYVDQELDINRLSDYDVDHIVPQSFLKDDSIDNKVLTRSDKNRGKSDNVPSEEVVKKMKNYWRQLLNAKLITQRKFDNLTKAERGGLSELDKAGFIKRQLVETRQITKHVAQILDSRMNTKYDENDKLIREVKVITLKSKLVSDFRKDFQFYKVREINNYHHAHDAYLNAVVGTALIKKYPKLESEFVYGDYKVYDVRKMIAKSEQEIGKATAKYFFYSNIMNFFKTEITLANGEIRKRPLIETNGETGEIVWDKGRDFATVRKVLSMPQVNIVKKTEVQTGGFSKESILPKRNSDKLIARKKDWDPKKYGGFDSPTVAYSVLVVAKVEKGKSKKLKSVKELLGITIMERSSFEKNPIDFLEAKGYKEVKKDLIIKLPKYSLFELENGRKRMLASAGELQKGNELALPSKYVNFLYLASHYEKLKGSPEDNEQKQLFVEQHKHYLDEIIEQISEFSKRVILADANLDKVLSAYNKHRDSGGSKRTADGSEFEPKKKRKV

SEQ ID NO: 82 - protein, 7 aa, Artificial Sequence
  Synthetic
PKKKRKV

SEQ ID NO: 83 - protein, 30 aa, Artificial Sequence
  Synthetic
MDSLLMNRRKFLYQFKNVRWAKGRRETYLC

SEQ ID NO: 84 - protein, 18 aa, Artificial Sequence
  Synthetic
KRTADGSEFESPKKKRKV

SEQ ID NO: 85 - protein, 17 aa, Artificial Sequence
  Synthetic
KRTADGSEFEPKKKRKV

SEQ ID NO: 86 - DNA, 23 bp, Artificial Sequence
  Synthetic
  misc_feature (1)..(8): n is a, c, g, or t
  misc_feature (9)..(20): n is a, c, g, or t
  misc_feature (21)..(21): n is a, c, g, or t
nnnnnnnnnnnnnnnnnnnnngg

SEQ ID NO: 87 - DNA, 15 bp, Artificial Sequence
  Synthetic
  misc_feature (1)..(12): n is a, c, g, or t
  misc_feature (13)..(13): n is a, c, g, or t
nnnnnnnnnnnnngg

SEQ ID NO: 88 - DNA, 23 bp, Artificial Sequence
  Synthetic
  misc_feature (1)..(9): n is a, c, g, or t
  misc_feature (10)..(20): n is a, c, g, or t
  misc_feature (21)..(21): n is a, c, g, or t
nnnnnnnnnnnnnnnnnnnnngg

SEQ ID NO: 89 - DNA, 14 bp, Artificial Sequence
  Synthetic
  misc_feature (1)..(11): n is a, c, g, or t
  misc_feature (12)..(12): n is a, c, g, or t
nnnnnnnnnnnngg

SEQ ID NO: 90 - DNA, 27 bp, Artificial Sequence
  Synthetic
  misc_feature (1)..(8): n is a, c, g, or t
  misc_feature (9)..(20): n is a, c, g, or t
  misc_feature (21)..(22): n is a, c, g, or t
nnnnnnnnnnnnnnnnnnnnnnagaaw

SEQ ID NO: 91 - DNA, 19 bp, Artificial Sequence
  Synthetic
  misc_feature (1)..(12): n is a, c, g, or t
  misc_feature (13)..(14): n is a, c, g, or t
nnnnnnnnnnnnnnagaaw

SEQ ID NO: 92 - DNA, 27 bp, Artificial Sequence
  Synthetic
  misc_feature (1)..(9): n is a, c, g, or t
  misc_feature (10)..(20): n is a, c, g, or t
  misc_feature (21)..(22): n is a, c, g, or t
nnnnnnnnnnnnnnnnnnnnnnagaaw

SEQ ID NO: 93 - DNA, 18 bp, Artificial Sequence
  Synthetic
  misc_feature (1)..(11): n is a, c, g, or t
  misc_feature (12)..(13): n is a, c, g, or t
nnnnnnnnnnnnnagaaw

SEQ ID NO: 94 - DNA, 25 bp, Artificial Sequence
  Synthetic
  misc_feature (1)..(8): n is a, c, g, or t
  misc_feature (9)..(20): n is a, c, g, or t
  misc_feature (21)..(21): n is a, c, g, or t
  misc_feature (24)..(24): n is a, c, g, or t
nnnnnnnnnnnnnnnnnnnnnggng

SEQ ID NO: 95 - DNA, 17 bp, Artificial Sequence
  Synthetic
  misc_feature (1)..(12): n is a, c, g, or t
  misc_feature (13)..(13): n is a, c, g, or t
  misc_feature (16)..(16): n is a, c, g, or t
nnnnnnnnnnnnnggng

SEQ ID NO: 96 - DNA, 25 bp, Artificial Sequence
  Synthetic
  misc_feature (1)..(9): n is a, c, g, or t
  misc_feature (10)..(20): n is a, c, g, or t
  misc_feature (21)..(21): n is a, c, g, or t
  misc_feature (24)..(24): n is a, c, g, or t
nnnnnnnnnnnnnnnnnnnnnggng

SEQ ID NO: 97 - DNA, 16 bp, Artificial Sequence
  Synthetic
  misc_feature (1)..(11): n is a, c, g, or t
  misc_feature (12)..(12): n is a, c, g, or t
  misc_feature (15)..(15): n is a, c, g, or t
nnnnnnnnnnnnggng

SEQ ID NO: 98 - DNA, 125 bp, Artificial Sequence
  Synthetic
  misc_feature (1)..(8): n is a, c, g, or t
nnnnnnnngtttttgtactctcaagatttagaaataaatcttgcagaagctacaaagataaggcttcatgccgaaatcaacaccctgtcattttatggcagggtgttttcgttatttaatttttt

SEQ ID NO: 99 - DNA, 121 bp, Artificial Sequence
  Synthetic
  misc_feature (1)..(18): n is a, c, g, or t
nnnnnnnnnnnnnnnnnngtttttgtactctcagaaatgcagaagctacaaagataaggcttcatgccgaaatcaacaccctgtcattttatggcagggtgttttcgttatttaatttttt

SEQ ID NO: 100 - DNA, 109 bp, Artificial Sequence
  Synthetic
  misc_feature (1)..(20): n is a, c, g, or t
nnnnnnnnnnnnnnnnnnnngtttttgtactctcagaaatgcagaagctacaaagataaggcttcatgccgaaatcaacaccctgtcattttatggcagggtgtttttt

SEQ ID NO: 101 - DNA, 102 bp, Artificial Sequence
  Synthetic
  misc_feature (1)..(20): n is a, c, g, or t
nnnnnnnnnnnnnnnnnnnngttttagagctagaaatagcaagttaaaataaggctagtccgttatcaacttgaaaaagtggcaccgagtcggtgctttttt

SEQ ID NO: 102 - DNA, 88 bp, Artificial Sequence
  Synthetic
  misc_feature (1)..(20): n is a, c, g, or t
nnnnnnnnnnnnnnnnnnnngttttagagctagaaatagcaagttaaaataaggctagtccgttatcaacttgaaaaagtgttttttt

SEQ ID NO: 103 - DNA, 76 bp, Artificial Sequence
  Synthetic
  misc_feature (1)..(20): n is a, c, g, or t
nnnnnnnnnnnnnnnnnnnngttttagagctagaaatagcaagttaaaataaggctagtccgttatcatttttttt

SEQ ID NO: 104 - RNA, 81 nt, Artificial Sequence
  Synthetic
guuuuagagcuagaaauagcaaguuaaaauaaggcuaguccguuaucaacuugaaaaaguggcaccgagucggugcuuuuu

SEQ ID NO: 105 - protein, 150 aa, Artificial Sequence
  Synthetic
  SITE (6)..(150): may be absent
GGGGSGGGGSGGGGSGGGGSGGGGSGGGGSGGGGSGGGGSGGGGSGGGGSGGGGSGGGGSGGGGSGGGGSGGGGSGGGGSGGGGSGGGGSGGGGSGGGGSGGGGSGGGGSGGGGSGGGGSGGGGSGGGGSGGGGSGGGGSGGGGSGGGGS

SEQ ID NO: 106 - protein, 30 aa, Artificial Sequence
  Synthetic
  SITE (2)..(30): may be absent
GGGGGGGGGGGGGGGGGGGGGGGGGGGGGG

SEQ ID NO: 107 - protein, 150 aa, Artificial Sequence
  Synthetic
  SITE (6)..(150): may be absent
EAAAKEAAAKEAAAKEAAAKEAAAKEAAAKEAAAKEAAAKEAAAKEAAAKEAAAKEAAAKEAAAKEAAAKEAAAKEAAAKEAAAKEAAAKEAAAKEAAAKEAAAKEAAAKEAAAKEAAAKEAAAKEAAAKEAAAKEAAAKEAAAKEAAAK

SEQ ID NO: 108 - protein, 90 aa, Artificial Sequence
  Synthetic
  SITE (4)..(90): may be absent
GGSGGSGGSGGSGGSGGSGGSGGSGGSGGSGGSGGSGGSGGSGGSGGSGGSGGSGGSGGSGGSGGSGGSGGSGGSGGSGGSGGSGGSGGS

SEQ ID NO: 109 - protein, 120 aa, Artificial Sequence
  Synthetic
  SITE (5)..(120): may be absent
SGGSSGGSSGGSSGGSSGGSSGGSSGGSSGGSSGGSSGGSSGGSSGGSSGGSSGGSSGGSSGGSSGGSSGGSSGGSSGGSSGGSSGGSSGGSSGGSSGGSSGGSSGGSSGGSSGGSSGGS

SEQ ID NO: 110 - protein, 60 aa, Artificial Sequence
  Synthetic
  SITE (1)..(1): Xaa can be any naturally occurring amino acid
  SITE (3)..(60): may be absent
XPXPXPXPXPXPXPXPXPXPXPXPXPXPXPXPXPXPXPXPXPXPXPXPXPXPXPXPXPXP

SEQ ID NO: 111 - protein, 21 aa, Artificial Sequence
  Synthetic
  SITE (4)..(21): may be absent
  SITE (10)..(21): may be absent
GGSGGSGGSGGSGGSGGSGGS

SEQ ID NO: 112 - protein, 16 aa, Artificial Sequence
  Synthetic
SGSETPGTSESATPES

SEQ ID NO: 113 - protein, 32 aa, Artificial Sequence
  Synthetic
SGGSSGGSSGSETPGTSESATPESSGGSSGGS

SEQ ID NO: 114 - protein, 10 aa, Artificial Sequence
  Synthetic
SGGSGGSGGS

SEQ ID NO: 115 - protein, 4 aa, Artificial Sequence
  Synthetic
SGGS

SEQ ID NO: 116 - RNA, 82 nt, Artificial Sequence
  Synthetic
guuuuagagcuagaaauagcaaguuaaaauaaaggcuaguccguuaucaacuugaaaaaguggcaccgagucggugcuuuuu

SEQ ID NO: 117 - protein, 228 aa, Artificial Sequence
  Synthetic
SSETGPVAVDPTLRRRIEPHEFEVFFDPRELRKETCLLYEINWGGRHSIWRHTSQNTNKHVEVNFIEKFTTERYFCPNTRCSITWFLSWSPCGECSRAITEFLSRYPHVTLFIYIARLYHHADPRNRQGLRDLISSGVTIQIMTEQESGYCWRNFVNYSPSNEAHWPRYPHLWVRLYVLELYCIILGLPPCLNILRRKQPQLTFFTIALQSCHYQRLPPHILWATGLK

SEQ ID NO: 118 - protein, 83 aa, Artificial Sequence
  Synthetic
TNLSDIIEKETGKQLVIQESILMLPEEVEEVIGNKPESDILVHTAYDESTDENVMLLTSDAPEYKPWALVIQDSNGENKIKML

SEQ ID NO: 119 - protein, 166 aa, Artificial Sequence
  Synthetic
SEVEFSHEYWMRHALTLAKRARDEREVPVGAVLVLNNRVIGEGWNRAIGLHDPTAHAEIMALRQGGLVMQNYRLIDATLYVTFEPCVMCAGAMIHSRIGRVVFGVRNAKTGAAGSLMDVLHYPGMNHRVEITEGILADECAALLCYFFRMPRQVFNAQKKAQSSTD

SEQ ID NO: 120 - RNA, 43 nt, Artificial Sequence
  Synthetic
guuuuagagcuagaaauagcaaguuaaaauaaggcuaguccgu

SEQ ID NO: 121 - DNA, 22 bp, Artificial Sequence
  Synthetic
gtggtagacagcatgtgtccta

SEQ ID NO: 122 - DNA, 22 bp, Artificial Sequence
  Synthetic
gtggtagacagcatgtgtccta

SEQ ID NO: 123 - DNA, 22 bp, Artificial Sequence
  Synthetic
gtggtagacagcgtgtgtccta

SEQ ID NO: 124 - DNA, 22 bp, Artificial Sequence
  Synthetic
atttacagcctggcctttgggg

SEQ ID NO: 125 - DNA, 22 bp, Artificial Sequence
  Synthetic
atttacagcctggcctttgggg

SEQ ID NO: 126 - DNA, 21 bp, Artificial Sequence
  Synthetic
atttgcagcctgcctttgggg

SEQ ID NO: 127 - DNA, 22 bp, Artificial Sequence
  Synthetic
ggagacaaagagaagttgattg

SEQ ID NO: 128 - DNA, 22 bp, Artificial Sequence
  Synthetic
ggagagaaagagaacttgattg

SEQ ID NO: 129 - DNA, 22 bp, Artificial Sequence
  Synthetic
ggagagaaagggaagttgattg

SEQ ID NO: 130 - DNA, 22 bp, Artificial Sequence
  Synthetic
gtgtcaggtaatgtgctaaaca

SEQ ID NO: 131 - DNA, 22 bp, Artificial Sequence
  Synthetic
gtgtcaggtaatgtgctaaaca

SEQ ID NO: 132 - DNA, 22 bp, Artificial Sequence
  Synthetic
gtgtcaggtgatgtgctaaaca

SEQ ID NO: 133 - DNA, 22 bp, Artificial Sequence
  Synthetic
gcagggcacagggaagaacctc

SEQ ID NO: 134 - DNA, 22 bp, Artificial Sequence
  Synthetic
gcagggcacagggaagaacctc

SEQ ID NO: 135 - DNA, 22 bp, Artificial Sequence
  Synthetic
gcagggcgcagggaagaacctc

SEQ ID NO: 136 - DNA, 22 bp, Artificial Sequence
  Synthetic
gctgttgcatgaggaaagggac

SEQ ID NO: 137 - DNA, 22 bp, Artificial Sequence
  Synthetic
gctgttgcatgaggaaagggac

SEQ ID NO: 138 - DNA, 22 bp, Artificial Sequence
  Synthetic
gctgttgcgtggggaaagggac

SEQ ID NO: 139 - DNA, 22 bp, Artificial Sequence
  Synthetic
ggcagtcatcttagtcattacc

SEQ ID NO: 140 - DNA, 22 bp, Artificial Sequence
  Synthetic
ggcagtcatcttagtcattacc

SEQ ID NO: 141 - DNA, 22 bp, Artificial Sequence
  Synthetic
ggcagtcatcttggtcattacc

SEQ ID NO: 142 - DNA, 22 bp, Artificial Sequence
  Synthetic
ccaacatacatgcccctttgcc

SEQ ID NO: 143 - DNA, 22 bp, Artificial Sequence
  Synthetic
ccaacatacatgcccctttgcc

SEQ ID NO: 144 - DNA, 22 bp, Artificial Sequence
  Synthetic
ccaacatgcatgcccctttgcc

SEQ ID NO: 145 - DNA, 22 bp, Artificial Sequence
  Synthetic
ggactagagtaggattgtaccc

SEQ ID NO: 146 - DNA, 22 bp, Artificial Sequence
  Synthetic
ggactagagtaggattgtaccc

SEQ ID NO: 147 - DNA, 22 bp, Artificial Sequence
  Synthetic
ggactagagtgggattgtaccc

SEQ ID NO: 148 - DNA, 22 bp, Artificial Sequence
  Synthetic
gttagacacgcagagcatttca

SEQ ID NO: 149 - DNA, 22 bp, Artificial Sequence
  Synthetic
gttagacacgcacagcatttca

SEQ ID NO: 150 - DNA, 22 bp, Artificial Sequence
  Synthetic
gttagacacgcgcagcatttca

SEQ ID NO: 151 - DNA, 22 bp, Artificial Sequence
  Synthetic
ggctgagctaactgtgacagca

SEQ ID NO: 152 - DNA, 22 bp, Artificial Sequence
  Synthetic
ggctgagctaactgtgacagca

SEQ ID NO: 153 - DNA, 22 bp, Artificial Sequence
  Synthetic
ggctgagctagctgtgacagca

SEQ ID NO: 154 - DNA, 22 bp, Artificial Sequence
  Synthetic
gggagctcaagcctgattccaa

SEQ ID NO: 155 - DNA, 22 bp, Artificial Sequence
  Synthetic
gggagctcaagcctgattccaa

SEQ ID NO: 156 - DNA, 22 bp, Artificial Sequence
  Synthetic
gggagctcgagcctgattccaa

SEQ ID NO: 157 - DNA, 20 bp, Artificial Sequence
  Synthetic
cgatggacaaaccagaagcc

SEQ ID NO: 158 - DNA, 25 bp, Artificial Sequence
  Synthetic
cgatggacaaaccagaagccgctcc

SEQ ID NO: 159 - DNA, 28 bp, Artificial Sequence
  Synthetic
ggaaactggaacacaaagcatagactgc

SEQ ID NO: 160 - DNA, 20 bp, Artificial Sequence
  Synthetic
gaacacaaagcatagactgc

SEQ ID NO: 161 - DNA, 20 bp, Artificial Sequence
  Synthetic
gaacacaatgcatagattgc

SEQ ID NO: 162 - DNA, 20 bp, Artificial Sequence
  Synthetic
aaacataaagcatagactgc

SEQ ID NO: 163 - DNA, 20 bp, Artificial Sequence
  Synthetic
gaacacaaagcatagactgc

SEQ ID NO: 164 - DNA, 20 bp, Artificial Sequence
  Synthetic
gaacacaatgcatagattgc

SEQ ID NO: 165 - DNA, 20 bp, Artificial Sequence
  Synthetic
aaacataaagcatagactgc

SEQ ID NO: 166 - DNA, 20 bp, Artificial Sequence
  Synthetic
gagtccgagcagaagaagaa

SEQ ID NO: 167 - DNA, 30 bp, Artificial Sequence
  Synthetic
cagattgtcagagttagagcagaagaagaa

SEQ ID NO: 168 - DNA, 23 bp, Artificial Sequence
  Synthetic
caagagtctaagcagaagaagaa

SEQ ID NO: 169 - DNA, 20 bp, Artificial Sequence
  Synthetic
gaggccgagcagaagaaaga

SEQ ID NO: 170 - DNA, 20 bp, Artificial Sequence
  Synthetic
gagtccgagcagaagaagaa

SEQ ID NO: 171 - DNA, 20 bp, Artificial Sequence
  Synthetic
gagttagagcagaagaagaa

SEQ ID NO: 172 - DNA, 20 bp, Artificial Sequence
  Synthetic
gagtctaagcagaagaagaa

SEQ ID NO: 173 - DNA, 20 bp, Artificial Sequence
  Synthetic
gaggccgagcagaagaaaga

SEQ ID NO: 174 - DNA, 27 bp, Artificial Sequence
  Synthetic
ccccggtggcactgcggctggaggtgg

SEQ ID NO: 175 - DNA, 29 bp, Artificial Sequence
  Synthetic
ccagcttggtgcactgcggccggaggagg

SEQ ID NO: 176 - DNA, 21 bp, Artificial Sequence
  Synthetic
gggctctgcggctggaggggg

SEQ ID NO: 177 - DNA, 40 bp, Artificial Sequence
  Synthetic
catgctgggaaaagatgccgggcacgacggctggaggtgg

SEQ ID NO: 178 - DNA, 20 bp, Artificial Sequence
  Synthetic
ggcatcacggctggaggtgg

SEQ ID NO: 179 - DNA, 20 bp, Artificial Sequence
  Synthetic
ggcactgcggctggaggtgg

SEQ ID NO: 180 - DNA, 20 bp, Artificial Sequence
  Synthetic
tgcactgcggccggaggagg

SEQ ID NO: 181 - DNA, 20 bp, Artificial Sequence
  Synthetic
ggctctgcggctggaggggg

SEQ ID NO: 182 - DNA, 20 bp, Artificial Sequence
  Synthetic
ggcacgacggctggaggtgg

SEQ ID NO: 183 - DNA, 20 bp, Artificial Sequence
  Synthetic
ggcacgacggctggaggtgg

SEQ ID NO: 184 - protein, 1803 aa, Artificial Sequence; identical to SEQ ID NO: 66
  Synthetic

SEQ ID NO: 185 - protein, 1803 aa, Artificial Sequence; identical to SEQ ID NO: 67
  Synthetic

SEQ ID NO: 186 - protein, 1803 aa, Artificial Sequence; identical to SEQ ID NO: 69
  Synthetic

SEQ ID NO: 187 - protein, 1489 aa, Artificial Sequence
  Synthetic
MKRTADGSEFESPKKKRKVSEVEFSHEYWMRHALTLAKRAWDEREVPVGAVLVHNNRVIGEGWNRPIGRHDPTAHAEIMALRQGGLVMQNYRLIDATLYVTLEPCVMCAGAMIHSRIGRVVFGARDAKTGAAGSLMDVLHHPGMNHRVEITEGILADECAALLSDFFRMRRQEIKAQKKAQSSTDSGGSSGGSSGSETPGTSESATPESSGGSSGGSSEVEFSHEYWMRHALTLAKRARDEREVPVGAVLVLNNRVIGEGWNRAIGLHDPTAHAEIMALRQGGLVMQNYRLIDATLYVTFEPCVMCAGAMIHSRIGRVVFGVRNAKTGAAGSLMDVLHYPGMNHRVEITEGILADECAALLCYFFRMPRQVFNAQKKAQSSTDSGGSSGGSSGSETPGTSESATPESSGGSSGGSGKRNYILGLAIGITSVGYGIIDYETRDVIDAGVRLFKEANVENNEGRRSKRGARRLKRRRRHRIQRVKKLLFDYNLLTDHSELSGINPYEARVKGLSQKLSEEEFSAALLHLAKRRGVHNVNEVEEDTGNELSTKEQISRNSKALEEKYVAELQLERLKKDGEVRGSINRFKTSDYVKEAKQLLKVQKAYHQLDQSFIDTYIDLLETRRTYYEGPGEGSPFGWKDIKEWYEMLMGHCTYFPEELRSVKYAYNADLYNALNDLNNLVITRDENEKLEYYEKFQIIENVFKQKKKPTLKQIAKEILVNEEDIKGYRVTSTGKPEFTNLKVYHDIKDITARKEIIENAELLDQIAKILTIYQSSEDIQEELTNLNSELTQEEIEQISNLKGYTGTHNLSLKAINLILDELWHTNDNQIAIFNRLKLVPKKVDLSQQKEIPTTLVDDFILSPVVKRSFIQSIKVINAIIKKYGLPNDIIIELAREKNSKDAQKMINEMQKRNRQTNERIEEIIRTTGKENAKYLIEKIKLHDMQEGKCLYSLEAIPLEDLLNNPFNYEVDHIIPRSVSFDNSFNNKVLVKQEENSKKGNRTPFQYLSSSDSKISYETFKKHILNLAKGKGRISKTKKEYLLEERDINRFSVQKDFINRNLVDTRYATRGLMNLLRSYFRVNNLDVKVKSINGGFTSFLRRKWKFKKERNKGYKHHAEDALIIANADFIFKEWKKLDKAKKVMENQMFEEKQAESMPEIETEQEYKEIFITPHQIKHIKDFKDYKYSHRVDKKPNRELINDTLYSTRKDDKGNTLIVNNLNGLYDKDNDKLKKLINKSPEKLLMYHHDPQTYQKLKLIMEQYGDEKNPLYKYYEETGNYLTKYSKKDNGPVIKKIKYYGNKLNAHLDITDDYPNSRNKVVKLSLKPYRFDVYLDNGVYKFVTVKNLDVIKKENYYEVNSKCYEEAKKLKKISNQAEFIASFYNNDLIKINGELYRVIGVNNDLLNRIEVNMIDITYREYLENMNDKRPPRIIKTIASKTQSIKKYSTDILGNLYEVKSKKHPQIIKKGSGGSKRTADGSEFEPKKKRKV

SEQ ID NO: 188 - protein, 1489 aa, Artificial Sequence; identical to SEQ ID NO: 71
  Synthetic

SEQ ID NO: 189 - protein, 1687 aa, Artificial Sequence; identical to SEQ ID NO: 72
  Synthetic

SEQ ID NO: 190 - protein, 1688 aa, Artificial Sequence; identical to SEQ ID NO: 73
  Synthetic

SEQ ID NO: 191 - protein, 1687 aa, Artificial Sequence; identical to SEQ ID NO: 74
  Synthetic

SEQ ID NO: 192 - protein, 1688 aa, Artificial Sequence; identical to SEQ ID NO: 75
  Synthetic

SEQ ID NO: 193 - protein, 1687 aa, Artificial Sequence; identical to SEQ ID NO: 76
  Synthetic

SEQ ID NO: 194 - protein, 1823 aa, Artificial Sequence
  Synthetic
MKRTADGSEFESPKKKRKVSEVEFSHEYWMRHALTLAKRAWDEREVPVGAVLVHNNRVIGEGWNRPIGRHDPTAHAEIMALRQGGLVMQNYRLIDATLYVTLEPCVMCAGAMIHSRIGRVVFGARDAKTGAAGSLMDVLHHPGMNHRVEITEGILADECAALLSDFFRMRRQEIKAQKKAQSSTDSGGSSGGSSGSETPGTSESATPESSGGSSGGSSEVEFSHEYWMRHALTLAKRARDEREVPVGAVLVLNNRVIGEGWNRAIGLHDPTAHAEIMALRQGGLVMQNYRLIDATLYVTFEPCVMCAGAMIHSRIGRVVFGVRNAKTGAAGSLMDVLHYPGMNHRVEITEGILADECAALLCYFFRMPRQVFNAQKKAQSSTDSGGSSGGSSGSETPGTSESATPESSGGSSGGSDYKVYDVRKMIAKSEQEIGKATAKYFFYSNIMNFFKTEITLANGEIRKRPLIETNGETGEIVWDKGRDFATVRKVLSMPQVNIVKKTEVQTGGFSKESILPKRNSDKLIARKKDWDPKKYGGFDSPTVAYSVLVVAKVEKGKSKKLKSVKELLGITIMERSSFEKNPIDFLEAKGYKEVKKDLIIKLPKYSLFELENGRKRMLASAGELQKGNELALPSKYVNFLYLASHYEKLKGSPEDNEQKQLFVEQHKHYLDEIIEQISEFSKRVILADANLDKVLSAYNKHRDKPIREQAENIIHLFTLTNLGAPAAFKYFDTTIDRKRYTSTKEVLDATLIHQSITGLYETRIDLSQLGGDGGSGGSGGSGGSGGSGGSGGDKKYSIGLAIGTNSVGWAVITDEYKVPSKKFKVLGNTDRHSIKKNLIGALLFDSGETAEATRLKRTARRRYTRRKNRICYLQEIFSNEMAKVDDSFFHRLEESFLVEEDKKHERHPIFGNIVDEVAYHEKYPTIYHLRKKLVDSTDKADLRLIYLALAHMIKFRGHFLIEGDLNPDNSDVDKLFIQLVQTYNQLFEENPINASGVDAKAILSARLSKSRRLENLIAQLPGEKKNGLFGNLIALSLGLTPNFKSNFDLAEDAKLQLSKDTYDDDLDNLLAQIGDQYADLFLAAKNLSDAILLSDILRVNTEITKAPLSASMIKRYDEHHQDLTLLKALVRQQLPEKYKEIFFDQSKNGYAGYIDGGASQEEFYKFIKPILEKMDGTEELLVKLNREDLLRKQRTFDNGSIPHQIHLGELHAILRRQEDFYPFLKDNREKIEKILTFRIPYYVGPLARGNSRFAWMTRKSEETITPWNFEEVVDKGASAQSFIERMTNFDKNLPNEKVLPKHSLLYEYFTVYNELTKVKYVTEGMRKPAFLSGEQKKAIVDLLFKTNRKVTVKQLKEDYFKKIECFDSVEISGVEDRFNASLGTYHDLLKIIKDKDFLDNEENEDILEDIVLTLTLFEDREMIEERLKTYAHLFDDKVMKQLKRRRYTGWGRLSRKLINGIRDKQSGKTILDFLKSDGFANRNFMQLIHDDSLTFKEDIQKAQVSGQGDSLHEHIANLAGSPAIKKGILQTVKVVDELVKVMGRHKPENIVIEMARENQTTQKGQKNSRERMKRIEEGIKELGSQILKEHPVENTQLQNEKLYLYYLQNGRDMYVDQELDINRLSDYDVDHIVPQSFLKDDSIDNKVLTRSDKNRGKSDNVPSEEVVKKMKNYWRQLLNAKLITQRKFDNLTKAERGGLSELDKAGFIKRQLVETRQITKHVAQILDSRMNTKYDENDKLIREVKVITLKSKLVSDFRKDFQFYKVREINNYHHAHDAYLNAVVGTALIKKYPKLESEFVYGSGGSKRTADGSEFEPKKKRKV

SEQ ID NO: 195 - protein, 1824 aa, Artificial Sequence; identical to SEQ ID NO: 78
  Synthetic

SEQ ID NO: 196 - protein, 1823 aa, Artificial Sequence; identical to SEQ ID NO: 79
  Synthetic

SEQ ID NO: 197 - protein, 1824 aa, Artificial Sequence; identical to SEQ ID NO: 80
  Synthetic

SEQ ID NO: 198 - protein, 1823 aa, Artificial Sequence; identical to SEQ ID NO: 81
  Synthetic

SEQ ID NO: 199 - DNA, 20 bp, Artificial Sequence
  Synthetic
ggcagagagcagaacacttt

SEQ ID NO: 200 - DNA, 20 bp, Artificial Sequence
  Synthetic
gggacaagcaatgggctggc

SEQ ID NO: 201 - DNA, 20 bp, Artificial Sequence
  Synthetic
gtggaactccttgggggtaa

SEQ ID NO: 202 - DNA, 20 bp, Artificial Sequence
  Synthetic
gatacaaggacaggcagcat

SEQ ID NO: 203 - DNA, 20 bp, Artificial Sequence
  Synthetic
gtctattctctatcttcatg

SEQ ID NO: 204 - DNA, 20 bp, Artificial Sequence
  Synthetic
gctcaagcctgattccaagg

SEQ ID NO: 205 - DNA, 20 bp, Artificial Sequence
  Synthetic
gccgtacccaaaggtcactc

SEQ ID NO: 206 - DNA, 20 bp, Artificial Sequence
  Synthetic
ggggactgagcagtaaacaa

SEQ ID NO: 207 - DNA, 20 bp, Artificial Sequence
  Synthetic
gatttatgcaaacgggttgg

SEQ ID NO: 208 - DNA, 20 bp, Artificial Sequence
  Synthetic
gcgacaggcgaagagctcag

SEQ ID NO: 209 - DNA, 20 bp, Artificial Sequence
  Synthetic
gaaggatggagagggcgggg

SEQ ID NO: 210 - DNA, 20 bp, Artificial Sequence
  Synthetic
gagagaacctggctaagcat

SEQ ID NO: 211 - DNA, 20 bp, Artificial Sequence
  Synthetic
gatccaggtgctgcagaagg

SEQ ID NO: 212 - DNA, 20 bp, Artificial Sequence
  Synthetic
gacaggcaggggcaccgcgg

SEQ ID NO: 213 - DNA, 20 bp, Artificial Sequence
  Synthetic
gtgccaccggggcgccgcgg

SEQ ID NO: 214 - DNA, 22 bp, Artificial Sequence
  Synthetic
gtggtagacagcatgtgtccta

SEQ ID NO: 215 - DNA, 22 bp, Artificial Sequence
  Synthetic
atttacagcctggcctttgggg

SEQ ID NO: 216 - DNA, 22 bp, Artificial Sequence
  Synthetic
ggagagaaagagaagttgattg

SEQ ID NO: 217 - DNA, 22 bp, Artificial Sequence
  Synthetic
gtgtcaggtaatgtgctaaaca

SEQ ID NO: 218 - DNA, 22 bp, Artificial Sequence
  Synthetic
gcagggcacagggaagaacctc

SEQ ID NO: 219 - DNA, 22 bp, Artificial Sequence
  Synthetic
gctgttgcatgaggaaagggac

SEQ ID NO: 220 - DNA, 22 bp, Artificial Sequence
  Synthetic
ggcagtcatcttagtcattacc

SEQ ID NO: 221 - DNA, 22 bp, Artificial Sequence
  Synthetic
ccaacatacatgcccctttgcc

SEQ ID NO: 222 - DNA, 22 bp, Artificial Sequence
  Synthetic
ggactagagtaggattgtaccc

SEQ ID NO: 223 - DNA, 22 bp, Artificial Sequence
  Synthetic
gttagacacgcacagcatttca

SEQ ID NO: 224 - DNA, 22 bp, Artificial Sequence
  Synthetic
ggctgagctaactgtgacagca

SEQ ID NO: 225 - DNA, 22 bp, Artificial Sequence
  Synthetic
gggagctcaagcctgattccaa

SEQ ID NO: 226 - DNA, 20 bp, Artificial Sequence
  Synthetic
gacaaaccagaagccgctcc

SEQ ID NO: 227 - DNA, 20 bp, Artificial Sequence
  Synthetic
gttcacacccatgacgaaca

SEQ ID NO: 228 - DNA, 20 bp, Artificial Sequence
  Synthetic
gaacacaaagcatagactgc

SEQ ID NO: 229 - DNA, 20 bp, Artificial Sequence
  Synthetic
gagtccgagcagaagaagaa

SEQ ID NO: 230 - DNA, 20 bp, Artificial Sequence
  Synthetic
gaagaccaaggatagactgc

SEQ ID NO: 231 - DNA, 57 bp, Artificial Sequence
  Synthetic
  misc_feature (34)..(37): n is a, c, g, or t
acactctttccctacacgacgctcttccgatctnnnnacatgagggtgcgtgagaag

SEQ ID NO: 232 - DNA, 49 bp, Artificial Sequence
  Synthetic
tggagttcagacgtgtgctcttccgatctgcagggcgcgttgtaattag

SEQ ID NO: 233 - DNA, 57 bp, Artificial Sequence
  Synthetic
  misc_feature (34)..(37): n is a, c, g, or t
acactctttccctacacgacgctcttccgatctnnnnccaatgactagggtgggcaa

SEQ ID NO: 234 - DNA, 49 bp, Artificial Sequence
  Synthetic
tggagttcagacgtgtgctcttccgatctgaggagaaggccaagtggtc

SEQ ID NO: 235 - DNA, 57 bp, Artificial Sequence
  Synthetic
  misc_feature (34)..(37): n is a, c, g, or t
acactctttccctacacgacgctcttccgatctnnnngaatatcaggggatggcgca

SEQ ID NO: 236 - DNA, 49 bp, Artificial Sequence
  Synthetic
tggagttcagacgtgtgctcttccgatcttccacacagccacaaggatc

SEQ ID NO: 237 - DNA, 57 bp, Artificial Sequence
  Synthetic
  misc_feature (34)..(37): n is a, c, g, or t
acactctttccctacacgacgctcttccgatctnnnnccctaaaccacctgcagagg

SEQ ID NO: 238 - DNA, 49 bp, Artificial Sequence
  Synthetic
tggagttcagacgtgtgctcttccgatctcagccccagccacattctat

SEQ ID NO: 239 - DNA, 49 bp, Artificial Sequence
  Synthetic
tggagttcagacgtgtgctcttccgatcttctctttctctcccccaccc

SEQ ID NO: 240 - DNA, 57 bp, Artificial Sequence
  Synthetic
  misc_feature (34)..(37): n is a, c, g, or t
acactctttccctacacgacgctcttccgatctnnnntcacttcagcccaggagtat

SEQ ID NO: 241 - DNA, 57 bp, Artificial Sequence
  Synthetic
  misc_feature (34)..(37): n is a, c, g, or t
acactctttccctacacgacgctcttccgatctnnnncgcgggctgaagtagatcaa

SEQ ID NO: 242 - DNA, 52 bp, Artificial Sequence
  Synthetic
tggagttcagacgtgtgctcttccgatctcctgtctctgctcctttgtcccc

SEQ ID NO: 243 - DNA, 57 bp, Artificial Sequence
  Synthetic
  misc_feature (34)..(37): n is a, c, g, or t
acactctttccctacacgacgctcttccgatctnnnngaggtttcctgccagctctc

SEQ ID NO: 244 - DNA, 49 bp, Artificial Sequence
  Synthetic
tggagttcagacgtgtgctcttccgatctgtctggcatcgagtaggctg

SEQ ID NO: 245 - DNA, 57 bp, Artificial Sequence
  Synthetic
  misc_feature (34)..(37): n is a, c, g, or t
acactctttccctacacgacgctcttccgatctnnnngatgccctccatcttctccg

SEQ ID NO: 246 - DNA, 49 bp, Artificial Sequence
  Synthetic
tggagttcagacgtgtgctcttccgatctaggtttgcatagacctgccc

SEQ ID NO: 247 - DNA, 57 bp, Artificial Sequence
  Synthetic
  misc_feature (34)..(37): n is a, c, g, or t
acactctttccctacacgacgctcttccgatctnnnnggagatagtccccttggggt

SEQ ID NO: 248 - DNA, 49 bp, Artificial Sequence
  Synthetic
tggagttcagacgtgtgctcttccgatctgtggcagagctacacgttct

SEQ ID NO: 249 - DNA, 57 bp, Artificial Sequence
  Synthetic
  misc_feature (34)..(37): n is a, c, g, or t
acactctttccctacacgacgctcttccgatctnnnncctctccatccttcacgcag

SEQ ID NO: 250 - DNA, 49 bp, Artificial Sequence
  Synthetic
tggagttcagacgtgtgctcttccgatctctttcgaggcggaggttagg

SEQ ID NO: 251 - DNA, 57 bp, Artificial Sequence
  Synthetic
  misc_feature (34)..(37): n is a, c, g, or t
acactctttccctacacgacgctcttccgatctnnnnatccaagcctcaagcctgtc

SEQ ID NO: 252 - DNA, 49 bp, Artificial Sequence; identical to SEQ ID NO: 250
  Synthetic

SEQ ID NO: 253 - DNA, 57 bp, Artificial Sequence
  Synthetic
  misc_feature (34)..(37): n is a, c, g, or t
acactctttccctacacgacgctcttccgatctnnnngaactcacagagcggtggaa

SEQ ID NO: 254 - DNA, 49 bp, Artificial Sequence
  Synthetic
tggagttcagacgtgtgctcttccgatctacaaatcctggcaccagacc

SEQ ID NO: 255 - DNA, 57 bp, Artificial Sequence
  Synthetic
  misc_feature (34)..(37): n is a, c, g, or t
acactctttccctacacgacgctcttccgatctnnnncattgcagagaggcgtatca

SEQ ID NO: 256 - DNA, 47 bp, Artificial Sequence
  Synthetic
tggagttcagacgtgtgctcttccgatctggggtcccaggtgctgac

SEQ ID NO: 257 - DNA, 57 bp, Artificial Sequence
  Synthetic
  misc_feature (34)..(37): n is a, c, g, or t
acactctttccctacacgacgctcttccgatctnnnngaacccaggtagccagagac

SEQ ID NO: 258 - DNA, 49 bp, Artificial Sequence
  Synthetic
tggagttcagacgtgtgctcttccgatcttcctttcaacccgaacggag

SEQ ID NO: 259 - DNA, 57 bp, Artificial Sequence; identical to SEQ ID NO: 257
  Synthetic
  misc_feature (34)..(37): n is a, c, g, or t

SEQ ID NO: 260 - DNA, 49 bp, Artificial Sequence; identical to SEQ ID NO: 258
  Synthetic

SEQ ID NO: 261 - DNA, 57 bp, Artificial Sequence
  Synthetic
  misc_feature (34)..(37): n is a, c, g, or t
acactctttccctacacgacgctcttccgatctnnnntgcagtctcctgcttctctg

SEQ ID NO: 262 - DNA, 48 bp, Artificial Sequence
  Synthetic
tggagttcagacgtgtgctcttccgattggtggagtgctctgtgtttg

SEQ ID NO: 263 - DNA, 58 bp, Artificial Sequence
  Synthetic
  misc_feature (34)..(37): n is a, c, g, or t
acactctttccctacacgacgctcttccgatctnnnnggacatttccaccgcaaaatg

SEQ ID NO: 264 - DNA, 47 bp, Artificial Sequence
  Synthetic
tggagttcagacgtgtgctcttccgatgctacagaaaggtcagcagc

SEQ ID NO: 265 - DNA, 57 bp, Artificial Sequence; identical to SEQ ID NO: 240
  Synthetic
  misc_feature (34)..(37): n is a, c, g, or t

SEQ ID NO: 266 - DNA, 51 bp, Artificial Sequence
  Synthetic
tggagttcagacgtgtgctcttccgatcttgtgtatggtgagaggtaggga

SEQ ID NO: 267 - DNA, 57 bp, Artificial Sequence
  Synthetic
  misc_feature (34)..(37): n is a, c, g, or t
acactctttccctacacgacgctcttccgatctnnnnctgcacctagcctccatgtc

SEQ ID NO: 268 - DNA, 49 bp, Artificial Sequence
  Synthetic
tggagttcagacgtgtgctcttccgatctgctgtggcatccagagacat

SEQ ID NO: 269 - DNA, 58 bp, Artificial Sequence
  Synthetic
  misc_feature (34)..(37): n is a, c, g, or t
acactctttccctacacgacgctcttccgatctnnnnctgggaatagagggtagtttc

SEQ ID NO: 270 - DNA, 49 bp, Artificial Sequence
  Synthetic
tggagttcagacgtgtgctcttccgatctcactctgcacagctggagaa

SEQ ID NO: 271 - DNA, 57 bp, Artificial Sequence
  Synthetic
  misc_feature (34)..(37): n is a, c, g, or t
acactctttccctacacgacgctcttccgatctnnnnccctgttcctaaagcccacc

SEQ ID NO: 272 - DNA, 49 bp, Artificial Sequence
  Synthetic
tggagttcagacgtgtgctcttccgatctactggttctgtttgtggcca

SEQ ID NO: 273 - DNA, 57 bp, Artificial Sequence
  Synthetic
  misc_feature (34)..(37): n is a, c, g, or t
acactctttccctacacgacgctcttccgatctnnnnacgtctcatatgccccttgg

SEQ ID NO: 274 - DNA, 51 bp, Artificial Sequence
  Synthetic
tggagttcagacgtgtgctcttccgatctacgtaggaattttggtgggaca

SEQ ID NO: 275 - DNA, 57 bp, Artificial Sequence; identical to SEQ ID NO: 261
  Synthetic
  misc_feature (34)..(37): n is a, c, g, or t

SEQ ID NO: 276 - DNA, 48 bp, Artificial Sequence; identical to SEQ ID NO: 262
  Synthetic

SEQ ID NO: 277 - DNA, 57 bp, Artificial Sequence; identical to SEQ ID NO: 271
  Synthetic
  misc_feature (34)..(37): n is a, c, g, or t

SEQ ID NO: 278 - DNA, 49 bp, Artificial Sequence; identical to SEQ ID NO: 272
  Synthetic

SEQ ID NO: 279 - DNA, 57 bp, Artificial Sequence
  Synthetic
  misc_feature (34)..(37): n is a, c, g, or t
acactctttccctacacgacgctcttccgatctnnnnagagactgattgcgtggagt

SEQ ID NO: 280 - DNA, 49 bp, Artificial Sequence
  Synthetic
tggagttcagacgtgtgctcttccgatctcactccagcctaggcaacaa

SEQ ID NO: 281 - DNA, 57 bp, Artificial Sequence
  Synthetic
  misc_feature (34)..(37): n is a, c, g, or t
acactctttccctacacgacgctcttccgatctnnnnccagccccatctgtcaaact

SEQ ID NO: 282 - DNA, 54 bp, Artificial Sequence
  Synthetic
tggagttcagacgtgtgctcttccgatcttgaatggattccttggaaacaatga

SEQ ID NO: 283 - DNA, 57 bp, Artificial Sequence; identical to SEQ ID NO: 241
  Synthetic
  misc_feature (34)..(37): n is a, c, g, or t

SEQ ID NO: 284 - DNA, 52 bp, Artificial Sequence; identical to SEQ ID NO: 242
  Synthetic

SEQ ID NO: 285 - DNA, 61 bp, Artificial Sequence
  Synthetic
  misc_feature (34)..(37): n is a, c, g, or t
acactctttccctacacgacgctcttccgatctnnnnagccctctttttattggaactgtg

SEQ ID NO: 286 - DNA, 49 bp, Artificial Sequence
  Synthetic
tggagttcagacgtgtgctcttccgatctccgactggtccacttaccta

SEQ ID NO: 287 - DNA, 57 bp, Artificial Sequence
  Synthetic
  misc_feature (34)..(37): n is a, c, g, or t
acactctttccctacacgacgctcttccgatctnnnnctgactcagccctgcaaagg

SEQ ID NO: 288 - DNA, 48 bp, Artificial Sequence
  Synthetic
tggagttcagacgtgtgctcttccgatctcaagtcaggggagcgtgtc

SEQ ID NO: 289 - DNA, 57 bp, Artificial Sequence; identical to SEQ ID NO: 281
  Synthetic
  misc_feature (34)..(37): n is a, c, g, or t

SEQ ID NO: 290 - DNA, 54 bp, Artificial Sequence; identical to SEQ ID NO: 282
  Synthetic

SEQ ID NO: 291 - DNA, 57 bp, Artificial Sequence
  Synthetic
  misc_feature (34)..(37): n is a, c, g, or t
acactctttccctacacgacgctcttccgatctnnnncagctcagcctgagtgttga

SEQ ID NO: 292 - DNA, 48 bp, Artificial Sequence
  Synthetic
tggagttcagacgtgtgctcttccgatctctcgtgggtttgtggttgc

SEQ ID NO: 293 - DNA, 57 bp, Artificial Sequence
  Synthetic
  misc_feature (34)..(37): n is a, c, g, or t
acactctttccctacacgacgctcttccgatctnnnnttgcttattgctgaggggca

SEQ ID NO: 294 - DNA, 49 bp, Artificial Sequence
  Synthetic
tggagttcagacgtgtgctcttccgatctacctctctcctccagctgag

SEQ ID NO: 295 - protein, 1387 aa, Artificial Sequence
  Synthetic
DYKVYDVRKMIAKSEQEIGKATAKYFFYSNIMNFFKTEITLANGEIRKRPLIETNGETGEIVWDKGRDFATVRKVLSMPQVNIVKKTEVQTGGFSKESILPKRNSDKLIARKKDWDPKKYGGFDSPTVAYSVLVVAKVEKGKSKKLKSVKELLGITIMERSSFEKNPIDFLEAKGYKEVKKDLIIKLPKYSLFELENGRKRMLASAGELQKGNELALPSKYVNFLYLASHYEKLKGSPEDNEQKQLFVEQHKHYLDEIIEQISEFSKRVILADANLDKVLSAYNKHRDKPIREQAENIIHLFTLTNLGAPAAFKYFDTTIDRKRYTSTKEVLDATLIHQSITGLYETRIDLSQLGGDGGSGGSGGSGGSGGSGGSGGDKKYSIGLAIGTNSVGWAVITDEYKVPSKKFKVLGNTDRHSIKKNLIGALLFDSGETAEATRLKRTARRRYTRRKNRICYLQEIFSNEMAKVDDSFFHRLEESFLVEEDKKHERHPIFGNIVDEVAYHEKYPTIYHLRKKLVDSTDKADLRLIYLALAHMIKFRGHFLIEGDLNPDNSDVDKLFIQLVQTYNQLFEENPINASGVDAKAILSARLSKSRRLENLIAQLPGEKKNGLFGNLIALSLGLTPNFKSNFDLAEDAKLQLSKDTYDDDLDNLLAQIGDQYADLFLAAKNLSDAILLSDILRVNTEITKAPLSASMIKRYDEHHQDLTLLKALVRQQLPEKYKEIFFDQSKNGYAGYIDGGASQEEFYKFIKPILEKMDGTEELLVKLNREDLLRKQRTFDNGSIPHQIHLGELHAILRRQEDFYPFLKDNREKIEKILTFRIPYYVGPLARGNSRFAWMTRKSEETITPWNFEEVVDKGASAQSFIERMTNFDKNLPNEKVLPKHSLLYEYFTVYNELTKVKYVTEGMRKPAFLSGEQKKAIVDLLFKTNRKVTVKQLKEDYFKKIECFDSVEISGVEDRFNASLGTYHDLLKIIKDKDFLDNEENEDILEDIVLTLTLFEDREMIEERLKTYAHLFDDKVMKQLKRRRYTGWGRLSRKLINGIRDKQSGKTILDFLKSDGFANRNFMQLIHDDSLTFKEDIQKAQVSGQGDSLHEHIANLAGSPAIKKGILQTVKVVDELVKVMGRHKPENIVIEMARENQTTQKGQKNSRERMKRIEEGIKELGSQILKEHPVENTQLQNEKLYLYYLQNGRDMYVDQELDINRLSDYDVDHIVPQSFLKDDSIDNKVLTRSDKNRGKSDNVPSEEVVKKMKNYWRQLLNAKLITQRKFDNLTKAERGGLSELDKAGFIKRQLVETRQITKHVAQILDSRMNTKYDENDKLIREVKVITLKSKLVSDFRKDFQFYKVREINNYHHAHDAYLNAVVGTALIKKYPKLESEFVYG

SEQ ID NO: 296 - protein, 1388 aa, Artificial Sequence
  Synthetic
EIGKATAKYFFYSNIMNFFKTEITLANGEIRKRPLIETNGETGEIVWDKGRDFATVRKVLSMPQVNIVKKTEVQTGGFSKESILPKRNSDKLIARKKDWDPKKYGGFDSPTVAYSVLVVAKVEKGKSKKLKSVKELLGITIMERSSFEKNPIDFLEAKGYKEVKKDLIIKLPKYSLFELENGRKRMLASAGELQKGNELALPSKYVNFLYLASHYEKLKGSPEDNEQKQLFVEQHKHYLDEIIEQISEFSKRVILADANLDKVLSAYNKHRDKPIREQAENIIHLFTLTNLGAPAAFKYFDTTIDRKRYTSTKEVLDATLIHQSITGLYETRIDLSQLGGDGGSGGSGGSGGSGGSGGSGGMDKKYSIGLAIGTNSVGWAVITDEYKVPSKKFKVLGNTDRHSIKKNLIGALLFDSGETAEATRLKRTARRRYTRRKNRICYLQEIFSNEMAKVDDSFFHRLEESFLVEEDKKHERHPIFGNIVDEVAYHEKYPTIYHLRKKLVDSTDKADLRLIYLALAHMIKFRGHFLIEGDLNPDNSDVDKLFIQLVQTYNQLFEENPINASGVDAKAILSARLSKSRRLENLIAQLPGEKKNGLFGNLIALSLGLTPNFKSNFDLAEDAKLQLSKDTYDDDLDNLLAQIGDQYADLFLAAKNLSDAILLSDILRVNTEITKAPLSASMIKRYDEHHQDLTLLKALVRQQLPEKYKEIFFDQSKNGYAGYIDGGASQEEFYKFIKPILEKMDGTEELLVKLNREDLLRKQRTFDNGSIPHQIHLGELHAILRRQEDFYPFLKDNREKIEKILTFRIPYYVGPLARGNSRFAWMTRKSEETITPWNFEEVVDKGASAQSFIERMTNFDKNLPNEKVLPKHSLLYEYFTVYNELTKVKYVTEGMRKPAFLSGEQKKAIVDLLFKTNRKVTVKQLKEDYFKKIECFDSVEISGVEDRFNASLGTYHDLLKIIKDKDFLDNEENEDILEDIVLTLTLFEDREMIEERLKTYAHLFDDKVMKQLKRRRYTGWGRLSRKLINGIRDKQSGKTILDFLKSDGFANRNFMQLIHDDSLTFKEDIQKAQVSGQGDSLHEHIANLAGSPAIKKGILQTVKVVDELVKVMGRHKPENIVIEMARENQTTQKGQKNSRERMKRIEEGIKELGSQILKEHPVENTQLQNEKLYLYYLQNGRDMYVDQELDINRLSDYDVDHIVPQSFLKDDSIDNKVLTRSDKNRGKSDNVPSEEVVKKMKNYWRQLLNAKLITQRKFDNLTKAERGGLSELDKAGFIKRQLVETRQITKHVAQILDSRMNTKYDENDKLIREVKVITLKSKLVSDFRKDFQFYKVREINNYHHAHDAYLNAVVGTALIKKYPKLESEFVYGDYKVYDVRKMIAKSEQ

SEQ ID NO: 297 - protein, 1387 aa, Artificial Sequence
  Synthetic
NIMNFFKTEITLANGEIRKRPLIETNGETGEIVWDKGRDFATVRKVLSMPQVNIVKKTEVQTGGFSKESILPKRNSDKLIARKKDWDPKKYGGFDSPTVAYSVLVVAKVEKGKSKKLKSVKELLGITIMERSSFEKNPIDFLEAKGYKEVKKDLIIKLPKYSLFELENGRKRMLASAGELQKGNELALPSKYVNFLYLASHYEKLKGSPEDNEQKQLFVEQHKHYLDEIIEQISEFSKRVILADANLDKVLSAYNKHRDKPIREQAENIIHLFTLTNLGAPAAFKYFDTTIDRKRYTSTKEVLDATLIHQSITGLYETRIDLSQLGGDGGSGGSGGSGGSGGSGGSGGDKKYSIGLAIGTNSVGWAVITDEYKVPSKKFKVLGNTDRHSIKKNLIGALLFDSGETAEATRLKRTARRRYTRRKNRICYLQEIFSNEMAKVDDSFFHRLEESFLVEEDKKHERHPIFGNIVDEVAYHEKYPTIYHLRKKLVDSTDKADLRLIYLALAHMIKFRGHFLIEGDLNPDNSDVDKLFIQLVQTYNQLFEENPINASGVDAKAILSARLSKSRRLENLIAQLPGEKKNGLFGNLIALSLGLTPNFKSNFDLAEDAKLQLSKDTYDDDLDNLLAQIGDQYADLFLAAKNLSDAILLSDILRVNTEITKAPLSASMIKRYDEHHQDLTLLKALVRQQLPEKYKEIFFDQSKNGYAGYIDGGASQEEFYKFIKPILEKMDGTEELLVKLNREDLLRKQRTFDNGSIPHQIHLGELHAILRRQEDFYPFLKDNREKIEKILTFRIPYYVGPLARGNSRFAWMTRKSEETITPWNFEEVVDKGASAQSFIERMTNFDKNLPNEKVLPKHSLLYEYFTVYNELTKVKYVTEGMRKPAFLSGEQKKAIVDLLFKTNRKVTVKQLKEDYFKKIECFDSVEISGVEDRFNASLGTYHDLLKIIKDKDFLDNEENEDILEDIVLTLTLFEDREMIEERLKTYAHLFDDKVMKQLKRRRYTGWGRLSRKLINGIRDKQSGKTILDFLKSDGFANRNFMQLIHDDSLTFKEDIQKAQVSGQGDSLHEHIANLAGSPAIKKGILQTVKVVDELVKVMGRHKPENIVIEMARENQTTQKGQKNSRERMKRIEEGIKELGSQILKEHPVENTQLQNEKLYLYYLQNGRDMYVDQELDINRLSDYDVDHIVPQSFLKDDSIDNKVLTRSDKNRGKSDNVPSEEVVKKMKNYWRQLLNAKLITQRKFDNLTKAERGGLSELDKAGFIKRQLVETRQITKHVAQILDSRMNTKYDENDKLIREVKVITLKSKLVSDFRKDFQFYKVREINNYHHAHDAYLNAVVGTALIKKYPKLESEFVYGDYKVYDVRKMIAKSEQEIGKATAKYFFYS

SEQ ID NO: 298 - protein, 1388 aa, Artificial Sequence
  Synthetic
PEDNEQKQLFVEQHKHYLDEIIEQISEFSKRVILADANLDKVLSAYNKHRDKPIREQAENIIHLFTLTNLGAPAAFKYFDTTIDRKRYTSTKEVLDATLIHQSITGLYETRIDLSQLGGDGGSGGSGGSGGSGGSGGSGGMDKKYSIGLAIGTNSVGWAVITDEYKVPSKKFKVLGNTDRHSIKKNLIGALLFDSGETAEATRLKRTARRRYTRRKNRICYLQEIFSNEMAKVDDSFFHRLEESFLVEEDKKHERHPIFGNIVDEVAYHEKYPTIYHLRKKLVDSTDKADLRLIYLALAHMIKFRGHFLIEGDLNPDNSDVDKLFIQLVQTYNQLFEENPINASGVDAKAILSARLSKSRRLENLIAQLPGEKKNGLFGNLIALSLGLTPNFKSNFDLAEDAKLQLSKDTYDDDLDNLLAQIGDQYADLFLAAKNLSDAILLSDILRVNTEITKAPLSASMIKRYDEHHQDLTLLKALVRQQLPEKYKEIFFDQSKNGYAGYIDGGASQEEFYKFIKPILEKMDGTEELLVKLNREDLLRKQRTFDNGSIPHQIHLGELHAILRRQEDFYPFLKDNREKIEKILTFRIPYYVGPLARGNSRFAWMTRKSEETITPWNFEEVVDKGASAQSFIERMTNFDKNLPNEKVLPKHSLLYEYFTVYNELTKVKYVTEGMRKPAFLSGEQKKAIVDLLFKTNRKVTVKQLKEDYFKKIECFDSVEISGVEDRFNASLGTYHDLLKIIKDKDFLDNEENEDILEDIVLTLTLFEDREMIEERLKTYAHLFDDKVMKQLKRRRYTGWGRLSRKLINGIRDKQSGKTILDFLKSDGFANRNFMQLIHDDSLTFKEDIQKAQVSGQGDSLHEHIANLAGSPAIKKGILQTVKVVDELVKVMGRHKPENIVIEMARENQTTQKGQKNSRERMKRIEEGIKELGSQILKEHPVENTQLQNEKLYLYYLQNGRDMYVDQELDINRLSDYDVDHIVPQSFLKDDSIDNKVLTRSDKNRGKSDNVPSEEVVKKMKNYWRQLLNAKLITQRKFDNLTKAERGGLSELDKAGFIKRQLVETRQITKHVAQILDSRMNTKYDENDKLIREVKVITLKSKLVSDFRKDFQFYKVREINNYHHAHDAYLNAVVGTALIKKYPKLESEFVYGDYKVYDVRKMIAKSEQEIGKATAKYFFYSNIMNFFKTEITLANGEIRKRPLIETNGETGEIVWDKGRDFATVRKVLSMPQVNIVKKTEVQTGGFSKESILPKRNSDKLIARKKDWDPKKYGGFDSPTVAYSVLVVAKVEKGKSKKLKSVKELLGITIMERSSFEKNPIDFLEAKGYKEVKKDLIIKLPKYSLFELENGRKRMLASAGELQKGNELALPSKYVNFLYLASHYEKLKGS

SEQ ID NO: 299 - protein, 1387 aa, Artificial Sequence
  Synthetic
KPIREQAENIIHLFTLTNLGAPAAFKYFDTTIDRKRYTSTKEVLDATLIHQSITGLYETRIDLSQLGGDGGSGGSGGSGGSGGSGGSGGDKKYSIGLAIGTNSVGWAVITDEYKVPSKKFKVLGNTDRHSIKKNLIGALLFDSGETAEATRLKRTARRRYTRRKNRICYLQEIFSNEMAKVDDSFFHRLEESFLVEEDKKHERHPIFGNIVDEVAYHEKYPTIYHLRKKLVDSTDKADLRLIYLALAHMIKFRGHFLIEGDLNPDNSDVDKLFIQLVQTYNQLFEENPINASGVDAKAILSARLSKSRRLENLIAQLPGEKKNGLFGNLIALSLGLTPNFKSNFDLAEDAKLQLSKDTYDDDLDNLLAQIGDQYADLFLAAKNLSDAILLSDILRVNTEITKAPLSASMIKRYDEHHQDLTLLKALVRQQLPEKYKEIFFDQSKNGYAGYIDGGASQEEFYKFIKPILEKMDGTEELLVKLNREDLLRKQRTFDNGSIPHQIHLGELHAILRRQEDFYPFLKDNREKIEKILTFRIPYYVGPLARGNSRFAWMTRKSEETITPWNFEEVVDKGASAQSFIERMTNFDKNLPNEKVLPKHSLLYEYFTVYNELTKVKYVTEGMRKPAFLSGEQKKAIVDLLFKTNRKVTVKQLKEDYFKKIECFDSVEISGVEDRFNASLGTYHDLLKIIKDKDFLDNEENEDILEDIVLTLTLFEDREMIEERLKTYAHLFDDKVMKQLKRRRYTGWGRLSRKLINGIRDKQSGKTILDFLKSDGFANRNFMQLIHDDSLTFKEDIQKAQVSGQGDSLHEHIANLAGSPAIKKGILQTVKVVDELVKVMGRHKPENIVIEMARENQTTQKGQKNSRERMKRIEEGIKELGSQILKEHPVENTQLQNEKLYLYYLQNGRDMYVDQELDINRLSDYDVDHIVPQSFLKDDSIDNKVLTRSDKNRGKSDNVPSEEVVKKMKNYWRQLLNAKLITQRKFDNLTKAERGGLSELDKAGFIKRQLVETRQITKHVAQILDSRMNTKYDENDKLIREVKVITLKSKLVSDFRKDFQFYKVREINNYHHAHDAYLNAVVGTALIKKYPKLESEFVYGDYKVYDVRKMIAKSEQEIGKATAKYFFYSNIMNFFKTEITLANGEIRKRPLIETNGETGEIVWDKGRDFATVRKVLSMPQVNIVKKTEVQTGGFSKESILPKRNSDKLIARKKDWDPKKYGGFDSPTVAYSVLVVAKVEKGKSKKLKSVKELLGITIMERSSFEKNPIDFLEAKGYKEVKKDLIIKLPKYSLFELENGRKRMLASAGELQKGNELALPSKYVNFLYLASHYEKLKGSPEDNEQKQLFVEQHKHYLDEIIEQISEFSKRVILADANLDKVLSAYNKHRD

SEQ ID NO: 300 - protein, 357 aa, Artificial Sequence
  Synthetic
DYKVYDVRKMIAKSEQEIGKATAKYFFYSNIMNFFKTEITLANGEIRKRPLIETNGETGEIVWDKGRDFATVRKVLSMPQVNIVKKTEVQTGGFSKESILPKRNSDKLIARKKDWDPKKYGGFDSPTVAYSVLVVAKVEKGKSKKLKSVKELLGITIMERSSFEKNPIDFLEAKGYKEVKKDLIIKLPKYSLFELENGRKRMLASAGELQKGNELALPSKYVNFLYLASHYEKLKGSPEDNEQKQLFVEQHKHYLDEIIEQISEFSKRVILADANLDKVLSAYNKHRDKPIREQAENIIHLFTLTNLGAPAAFKYFDTTIDRKRYTSTKEVLDATLIHQSITGLYETRIDLSQLGGD

SEQ ID NO: 301 - protein, 341 aa, Artificial Sequence
  Synthetic
EIGKATAKYFFYSNIMNFFKTEITLANGEIRKRPLIETNGETGEIVWDKGRDFATVRKVLSMPQVNIVKKTEVQTGGFSKESILPKRNSDKLIARKKDWDPKKYGGFDSPTVAYSVLVVAKVEKGKSKKLKSVKELLGITIMERSSFEKNPIDFLEAKGYKEVKKDLIIKLPKYSLFELENGRKRMLASAGELQKGNELALPSKYVNFLYLASHYEKLKGSPEDNEQKQLFVEQHKHYLDEIIEQISEFSKRVILADANLDKVLSAYNKHRDKPIREQAENIIHLFTLTNLGAPAAFKYFDTTIDRKRYTSTKEVLDATLIHQSITGLYETRIDLSQLGGD

SEQ ID NO: 302 - protein, 328 aa, Artificial Sequence
  Synthetic
NIMNFFKTEITLANGEIRKRPLIETNGETGEIVWDKGRDFATVRKVLSMPQVNIVKKTEVQTGGFSKESILPKRNSDKLIARKKDWDPKKYGGFDSPTVAYSVLVVAKVEKGKSKKLKSVKELLGITIMERSSFEKNPIDFLEAKGYKEVKKDLIIKLPKYSLFELENGRKRMLASAGELQKGNELALPSKYVNFLYLASHYEKLKGSPEDNEQKQLFVEQHKHYLDEIIEQISEFSKRVILADANLDKVLSAYNKHRDKPIREQAENIIHLFTLTNLGAPAAFKYFDTTIDRKRYTSTKEVLDATLIHQSITGLYETRIDLSQLGGD

SEQ ID NO: 303 - protein, 120 aa, Artificial Sequence
  Synthetic
PEDNEQKQLFVEQHKHYLDEIIEQISEFSKRVILADANLDKVLSAYNKHRDKPIREQAENIIHLFTLTNLGAPAAFKYFDTTIDRKRYTSTKEVLDATLIHQSITGLYETRIDLSQLGGD

SEQ ID NO: 304 - protein, 69 aa, Artificial Sequence
  Synthetic
KPIREQAENIIHLFTLTNLGAPAAFKYFDTTIDRKRYTSTKEVLDATLIHQSITGLYETRIDLSQLGGD

SEQ ID NO: 305 - protein, 413 aa, Artificial Sequence
  Synthetic
CLAEGTRIFDPVTGTTHRIEDVVDGRKPIHVVAAAKDGTLLARPVVSWFDQGTRDVIGLRIAGGAIVWATPDHKVLTEYGWRAAGELRKGDRVAGPGGSGNSLALSLTADQMVSALLDAEPPILYSEYDPTSPFSEASMMGLLTNLADRELVHMINWAKRVPGFVDLTLHDQAHLLECAWLEILMIGLVWRSMEHPGKLLFAPNLLLDRNQGKCVEGMVEIFDMLLATSSRFRMMNLQGEEFVCLKSIILLNSGVYTFLSSTLKSLEEKDHIHRALDKITDTLIHLMAKAGLTLQQQHQRLAQLLLILSHIRHMSNKGMEHLYSMKYKNVVPLYDLLLEMLDAHRLHAGGSGASRVQAFADALDDKFLHDMLAEELRYSVIREVLPTRRARTFDLEVEELHTLVAEGVVVHNC

SEQ ID NO: 306 - protein, 413 aa, Artificial Sequence
  Synthetic
CLAEGTRIFDPVTGTTHRIEDVVDGRKPIHVVAVAKDGTLLARPVVSWFDQGTRDVIGLRIAGGAIVWATPDHKVLTEYGWRAAGELRKGDRVAGPGGSGNSLALSLTADQMVSALLDAEPPILYSEYDPTSPFSEASMMGLLTNLADRELVHMINWAKRVPGFVDLTLHDQAHLLECAWLEILMIGLVWRSMEHPGKLLFAPNLLLDRNQGKCVEGMVEIFDMLLATSSRFRMMNLQGEEFVCLKSIILLNSGVYTFLSSTLKSLEEKDHIHRALDKITDTLIHLMAKAGLTLQQQHQRLAQLLLILSHIRHMSNKGMEHLYSMKYTNVVPLYDLLLEMLDAHRLHAGGSGASRVQAFADALDDKFLHDMLAEELRYSVIREVLPTRRARTFDLEVEELHTLVAEGVVVHNC

SEQ ID NO: 307 - protein, 413 aa, Artificial Sequence
  Synthetic
CLAEGTRIFDPVTGTTHRIEDVVDGRKPIHVVAAAKDGTLLARPVVSWFDQGTRDVIGLRIAGGATVWATPDHKVLTEYGWRAAGELRKGDRVAGPGGSGNSLALSLTADQMVSALLDAEPPIPYSEYDPTSPFSEASMMGLLTNLADRELVHMINWAKRVPGFVDLTLHDQAHLLECAWLEILMIGLVWRSMEHPGKLLFAPNLLLDRNQGKCVEGMVEIFDMLLATSSRFRMMNLQGEEFVCLKSIILLNSGVYTFLSSTLKSLEEKDHIHRALDKITDTLIHLMAKAGLTLQQQHQRLAQLLLILSHIRHMSNKGMEHLYSMKYKNVVPLYDLLLEMLDAHRLHAGGSGASRVQAFADALDDKFLHDMLAEGLRYSVIREVLPTRRARTFDLEVEELHTLVAEGVVVHNC

SEQ ID NO: 308 - protein, 413 aa, Artificial Sequence
  Synthetic
CLAEGTRIFDPVTGTTHRIEDVVDGRKPIHVVAAAKDGTLLARPVVSWFDQGTRDVIGLRIAGGATVWATPDHKVLTEYGWRAAGELRKGDRVAGPGGSGNSLALSLTADQMVSALLDAEPPILYSEYDPTSPFSEASMMGLLTNLADRELVHMINWAKRVPGFVDLTLHDQAHLLECAWLEILMIGLVWRSMEHPGKLLFAPNLLLDRNQGKCVEGMVEIFDMLLATSSRFRMMNLQGEEFVCLKSIILLNSGVYTFLSSTLKSLEEKDHIHRALDKITDTLIHLMAKAGLTLQQQHQRLAQLLLILSHIRHMSNKGMEHLYSMKYKNVVPLYDLLLEMLDAHRLHAGGSGASRVQAFADALDDKFLHDMLAEELRYSVIREVLPTRRARTFDLEVEELHTLVAEGVVVHNC

SEQ ID NO: 309 - protein, 413 aa, Artificial Sequence
  Synthetic
CLAEGTRIFDPVTGTTHRIEDVVDGRKPIHVVAAAKDGTLLARPVVSWFDQGTRDVIGLRIAGGATVWATPDHKVLTEYGWRAAGELRKGDRVAGPGGSGNSLALSLTADQMVSALLDAEPPIPYSEYDPTSPFSEASMMGLLTNLADRELVHMINWAKRVPGFVDLTLHDQAHLLECAWLEILMIGLVWRSMEHPGKLLFAPNLLLDRNQGKCVEGMVEIFDMLLATSSRFRMMNLQGEEFVCLKSIILLNSGVYTFLSSTLKSLEEKDHIHRALDKITDTLIHLMAKAGLTLQQQHQRLAQLLLILSHIRHMSNKGMEHLYSMKYKNVVPLYDLLLEMLDAHRLHAGGSGASRVQAFADALDDKFLHDMLAEELRYSVIREVLPTRRARTFDLEVEELHTLVAEGVVVHNC

SEQ ID NO: 310 - protein, 413 aa, Artificial Sequence
  Synthetic
CLAEGTRIFDPVTGTTHRIEDVVDGRKPIHVVAAAKDGTLLARPVVSWFDQGTRDVIGLRIAGGATVWATPDHKVLTEYGWRAAGELRKGDRVAGPGGSGNSLALSLTADQMVSALLDAEPPILYSEYNPTSPFSEASMMGLLTNLADRELVHMINWAKRVPGFVDLTLHDQAHLLERAWLEILMIGLVWRSMEHPGKLLFAPNLLLDRNQGKCVEGMVEIFDMLLATSSRFRMMNLQGEEFVCLKSIILLNSGVYTFLSSTLKSLEEKDHIHRALDKITDTLIHLMAKAGLTLQQQHQRLAQLLLILSHIRHMSNKGMEHLYSMKYKNVVPLYDLLLEMLDAHRLHAGGSGASRVQAFADALDDKFLHDMLAEGLRYSVIREVLPTRRARTFDLEVEELHTLVAEGVVVHNC

SEQ ID NO: 311 - protein, 413 aa, Artificial Sequence
  Synthetic
CLAEGTRIFDPVTGTTHRIEDVVDGRKPIHVVAAAKDGTLLARPVVSWFDQGTRDVIGLRIAGGAIVWATPDHKVLTEYGWRAAGELRKGDRVAGPGGSGNSLALSLTADQMVSALLDAEPPILYSEYDPTSPFSEASMMGLLTNLADRELVHMINWAKRVPGFVDLTLHDQAHLLERAWLEILMIGLVWRSMEHPGKLLFAPNLLLDRNQGKCVEGMVEIFDMLLATSSRFRMMNLQGEEFVCLKSIILLNSGVYTFLSSTLKSLEEKDHIHRALDKITDTLIHLMAKAGLTLQQQHQRLAQLLLILSHIRHMSNKGMEHLYSMKYKNVVPLYDLLLEMLDAHRLHAGGSGASRVQAFADALDDKFLHDMLAEGLRYSVIREVLPTRRARTFDLEVEELHTLVAEGVVVHNC

SEQ ID NO: 312 - protein, 413 aa, Artificial Sequence
  Synthetic
CLAEGTRIFDPVTGTTHRIEDVVDGRKPIHVVAVAKDGTLLARPVVSWFDQGTRDVIGLRIAGGATVWATPDHKVLTEYGWRAAGELRKGDRVAGPGGSGNSLALSLTADQMVSALLDAEPPILYSEYDPTSPFSEASMMGLLTNLADRELVHMINWAKRVPGFVDLTLHDQAHLLERAWLEILMIGLVWRSMEHPGKLLFAPNLLLDRNQGKCVEGMVEIFDMLLATSSRFRMMNLQGEEFVCLKSIILLNSGVYTFLSSTLKSLEEKDHIHRALDKITDTLIHLMAKAGLTLQQQHQRLAQLLLILSHIRHMSNKGMEHLYSMKYKNVVPLYDLLLEMLDAHRLHAGGSGASRVQAFADALDDKFLHDMLAEELRYSVIREVLPTRRARTFDLEVEELHTLVAEGVVVHNC

SEQ ID NO: 313 - protein, 84 aa, Artificial Sequence
  Synthetic
MTNLSDIIEKETGKQLVIQESILMLPEEVEEVIGNKPESDILVHTAYDESTDENVMLLTSDAPEYKPWALVIQDSNGENKIKML

SEQ ID NO: 314 - protein, 20 aa, Artificial Sequence
  Synthetic
GGSGGSGGSGGSGGSGGSGG

SEQ ID NO: 315 - protein, 1368 aa, Streptococcus pyogenes [sequence omitted]

SEQ ID NO: 316 - DNA, 4104 bp, Streptococcus pyogenes
atggataaaaaatatagcattggcctggatattggcaccaacagcgtgggctgggcggtgattaccgatgaatataaagtgccgagcaaaaaatttaaagtgctgggcaacaccgatcgccatagcattaaaaaaaacctgattggcgcgctgctgtttgatagcggcgaaaccgcggaagcgacccgcctgaaacgcaccgcgcgccgccgctatacccgccgcaaaaaccgcatttgctatctgcaggaaatttttagcaacgaaatggcgaaagtggatgatagcttttttcatcgcctggaagaaagctttctggtggaagaagataaaaaacatgaacgccatccgatttttggcaacattgtggatgaagtggcgtatcatgaaaaatatccgaccatttatcatctgcgcaaaaaactggtggatagcaccgataaagcggatctgcgcctgatttatctggcgctggcgcatatgattaaatttcgcggccattttctgattgaaggcgatctgaacccggataacagcgatgtggataaactgtttattcagctggtgcagacctataaccagctgtttgaagaaaacccgattaacgcgagcggcgtggatgcgaaagcgattctgagcgcgcgcctgagcaaaagccgccgcctggaaaacctgattgcgcagctgccgggcgaaaaaaaaaacggcctgtttggcaacctgattgcgctgagcctgggcctgaccccgaactttaaaagcaactttgatctggcggaagatgcgaaactgcagctgagcaaagatacctatgatgatgatctggataacctgctggcgcagattggcgatcagtatgcggatctgtttctggcggcgaaaaacctgagcgatgcgattctgctgagcgatattctgcgcgtgaacaccgaaattaccaaagcgccgctgagcgcgagcatgattaaacgctatgatgaacatcatcaggatctgaccctgctgaaagcgctggtgcgccagcagctgccggaaaaatataaagaaattttttttgatcagagcaaaaacggctatgcgggctatattgatggcggcgcgagccaggaagaattttataaatttattaaaccgattctggaaaaaatggatggcaccgaagaactgctggtgaaactgaaccgcgaagatctgctgcgcaaacagcgcacctttgataacggcagcattccgcatcagattcatctgggcgaactgcatgcgattctgcgccgccaggaagatttttatccgtttctgaaagataaccgcgaaaaaattgaaaaaattctgacctttcgcattccgtattatgtgggcccgctggcgcgcggcaacagccgctttgcgtggatgacccgcaaaagcgaagaaaccattaccccgtggaactttgaagaagtggtggataaaggcgcgagcgcgcagagctttattgaacgcatgaccaactttgataaaaacctgccgaacgaaaaagtgctgccgaaacatagcctgctgtatgaatattttaccgtgtataacgaactgaccaaagtgaaatatgtgaccgaaggcatgcgcaaaccggcgtttctgagcggcgaacagaaaaaagcgattgtggatctgctgtttaaaaccaaccgcaaagtgaccgtgaaacagctgaaagaagattattttaaaaaaattgaatgctttgatagcgtggaaattagcggcgtggaagatcgctttaacgcgagcctgggcacctatcatgatctgctgaaaattattaaagataaagattttctggataacgaagaaaacgaagatattctggaagatattgtgctgaccctgaccctgtttgaagatcgcgaaatgattgaagaacgcctgaaaacctatgcgcatctgtttgatgataaagtgatgaaacagctgaaacgccgccgctataccggctggggccgcctgagccgcaaactgattaacggcattcgcgataaacagagcggcaaaaccattctggattttctgaaaagcgatggctttgcgaaccgcaactttatgcagctgattcatgatgatagcctgacctttaaagaagatattcagaaagcgcaggtgagcggccagggcgatagcctgcatgaacatattgcgaacctggcgggcagcccggcgattaaaaaaggcattctgcagaccgtgaaagtggtggatgaactggtgaaagtgatgggccgccataaaccggaaaacattgtgattgaaatggcgcgcgaaaaccagaccacccagaaaggccagaaaaacagccgcgaacgcatgaaacgcattgaagaaggcattaaagaactgggcagccagattctgaaagaacatccggtggaaaacacccagctgcagaacgaaaaactgtatctgtattatctgcagaacggccgcgatatgtatgtggatcaggaactggatattaaccgcctgagcgattatgatgtggatcatattgtgccgcagagctttctgaaagatgatagcattgataacaaagtgctgacccgcagcgataaaaaccgcggcaaaagcgataacgtgccgagcgaagaagtggtgaaaaaaatgaaaaactattggcgccagctgctgaacgcgaaactgattacccagcgcaaatttgataacctgaccaaagcggaacgcggcggcctgagcgaactggataaagcgggctttattaaacgccagctggtggaaacccgccagattaccaaacatgtggcgcagattctggatagccgcatgaacaccaaatatgatgaaaacgataaactgattcgcgaagtgaaagtgattaccctgaaaagcaaactggtgagcgattttcgcaaagattttcagttttataaagtgcgcgaaattaacaactatcatcatgcgcatgatgcgtatctgaacgcggtggtgggcaccgcgctgattaaaaaatatccgaaactggaaagcgaatttgtgtatggcgattataaagtgtatgatgtgcgcaaaatgattgcgaaaagcgaacaggaaattggcaaagcgaccgcgaaatattttttttatagcaacattatgaacttttttaaaaccgaaattaccctggcgaacggcgaaattcgcaaacgcccgctgattgaaaccaacggcgaaaccggcgaaattgtgtgggataaaggccgcgattttgcgaccgtgcgcaaagtgctgagcatgccgcaggtgaacattgtgaaaaaaaccgaagtgcagaccggcggctttagcaaagaaagcattctgccgaaacgcaacagcgataaactgattgcgcgcaaaaaagattgggatccgaaaaaatatggcggctttgatagcccgaccgtggcgtatagcgtgctggtggtggcgaaagtggaaaaaggcaaaagcaaaaaactgaaaagcgtgaaagaactgctgggcattaccattatggaacgcagcagctttgaaaaaaacccgattgattttctggaagcgaaaggctataaagaagtgaaaaaagatctgattattaaactgccgaaatatagcctgtttgaactggaaaacggccgcaaacgcatgctggcgagcgcgggcgaactgcagaaaggcaacgaactggcgctgccgagcaaatatgtgaactttctgtatctggcgagccattatgaaaaactgaaaggcagcccggaagataacgaacagaaacagctgtttgtggaacagcataaacattatctggatgaaattattgaacagattagcgaatttagcaaacgcgtgattctggcggatgcgaacctggataaagtgctgagcgcgtataacaaacatcgcgataaaccgattcgcgaacaggcggaaaacattattcatctgtttaccctgaccaacctgggcgcgccggcggcgtttaaatattttgataccaccattgatcgcaaacgctataccagcaccaaagaagtgctggatgcgaccctgattcatcagagcattaccggcctgtatgaaacccgcattgatctgagccagctgggcggcgat

SEQ ID NO: 317 - DNA, 4104 bp, Streptococcus pyogenes
atggataagaaatactcaataggcttagatatcggcacaaatagcgtcggatgggcggtgatcactgatgattataaggttccgtctaaaaagttcaaggttctgggaaatacagaccgccacagtatcaaaaaaaatcttataggggctcttttatttggcagtggagagacagcggaagcgactcgtctcaaacggacagctcgtagaaggtatacacgtcggaagaatcgtatttgttatctacaggagattttttcaaatgagatggcgaaagtagatgatagtttctttcatcgacttgaagagtcttttttggtggaagaagacaagaagcatgaacgtcatcctatttttggaaatatagtagatgaagttgcttatcatgagaaatatccaactatctatcatctgcgaaaaaaattggcagattctactgataaagcggatttgcgcttaatctatttggccttagcgcatatgattaagtttcgtggtcattttttgattgagggagatttaaatcctgataatagtgatgtggacaaactatttatccagttggtacaaatctacaatcaattatttgaagaaaaccctattaacgcaagtagagtagatgctaaagcgattctttctgcacgattgagtaaatcaagacgattagaaaatctcattgctcagctccccggtgagaagagaaatggcttgtttgggaatctcattgctttgtcattgggattgacccctaattttaaatcaaattttgatttggcagaagatgctaaattacagctttcaaaagatacttacgatgatgatttagataatttattggcgcaaattggagatcaatatgctgatttgtttttggcagctaagaatttatcagatgctattttactttcagatatcctaagagtaaatagtgaaataactaaggctcccctatcagcttcaatgattaagcgctacgatgaacatcatcaagacttgactcttttaaaagctttagttcgacaacaacttccagaaaagtataaagaaatcttttttgatcaatcaaaaaacggatatgcaggttatattgatgggggagctagccaagaagaattttataaatttatcaaaccaattttagaaaaaatggatggtactgaggaattattggtgaaactaaatcgtgaagatttgctgcgcaagcaacggacctttgacaacggctctattccccatcaaattcacttgggtgagctgcatgctattttgagaagacaagaagacttttatccatttttaaaagacaatcgtgagaagattgaaaaaatcttgacttttcgaattccttattatgttggtccattggcgcgtggcaatagtcgttttgcatggatgactcggaagtctgaagaaacaattaccccatggaattttgaagaagttgtcgataaaggtgcttcagctcaatcatttattgaacgcatgacaaactttgataaaaatcttccaaatgaaaaagtactaccaaaacatagtttgctttatgagtattttacggtttataacgaattgacaaaggtcaaatatgttactgagggaatgcgaaaaccagcatttctttcaggtgaacagaagaaagccattgttgatttactcttcaaaacaaatcgaaaagtaaccgttaagcaattaaaagaagattatttcaaaaaaatagaatgttttgatagtgttgaaatttcaggagttgaagatagatttaatgcttcattaggcgcctaccatgatttgctaaaaattattaaagataaagattttttggataatgaagaaaatgaagatatcttagaggatattgttttaacattgaccttatttgaagatagggggatgattgaggaaagacttaaaacatatgctcacctctttgatgataaggtgatgaaacagcttaaacgtcgccgttatactggttggggacgtttgtctcgaaaattgattaatggtattagggataagcaatctggcaaaacaatattagattttttgaaatcagatggttttgccaatcgcaattttatgcagctgatccatgatgatagtttgacatttaaagaagatattcaaaaagcacaggtgtctggacaaggccatagtttacatgaacagattgctaacttagctggcagtcctgctattaaaaaaggtattttacagactgtaaaaattgttgatgaactggtcaaagtaatggggcataagccagaaaatatcgttattgaaatggcacgtgaaaatcagacaactcaaaagggccagaaaaattcgcgagagcgtatgaaacgaatcgaagaaggtatcaaagaattaggaagtcagattcttaaagagcatcctgttgaaaatactcaattgcaaaatgaaaagctctatctctattatctacaaaatggaagagacatgtatgtggaccaagaattagatattaatcgtttaagtgattatgatgtcgatcacattgttccacaaagtttcattaaagacgattcaatagacaataaggtactaacgcgttctgataaaaatcgtggtaaatcggataacgttccaagtgaagaagtagtcaaaaagatgaaaaactattggagacaacttctaaacgccaagttaatcactcaacgtaagtttgataatttaacgaaagctgaacgtggaggtttgagtgaacttgataaagctggttttatcaaacgccaattggttgaaactcgccaaatcactaagcatgtggcacaaattttggatagtcgcatgaatactaaatacgatgaaaatgataaacttattcgagaggttaaagtgattaccttaaaatctaaattagtttctgacttccgaaaagatttccaattctataaagtacgtgagattaacaattaccatcatgcccatgatgcgtatctaaatgccgtcgttggaactgctttgattaagaaatatccaaaacttgaatcggagtttgtctatggtgattataaagtttatgatgttcgtaaaatgattgctaagtctgagcaagaaataggcaaagcaaccgcaaaatatttcttttactctaatatcatgaacttcttcaaaacagaaattacacttgcaaatggagagattcgcaaacgccctctaatcgaaactaatggggaaactggagaaattgtctgggataaagggcgagattttgccacagtgcgcaaagtattgtccatgccccaagtcaatattgtcaagaaaacagaagtacagacaggcggattctccaaggagtcaattttaccaaaaagaaattcggacaagcttattgctcgtaaaaaagactgggatccaaaaaaatatggtggttttgatagtccaacggtagcttattcagtcctagtggttgctaaggtggaaaaagggaaatcgaagaagttaaaatccgttaaagagttactagggatcacaattatggaaagaagttcctttgaaaaaaatccgattgactttttagaagctaaaggatataaggaagttaaaaaagacttaatcattaaactacctaaatatagtctttttgagttagaaaacggtcgtaaacggatgctggctagtgccggagaattacaaaaaggaaatgagctggctctgccaagcaaatatgtgaattttttatatttagctagtcattatgaaaagttgaagggtagtccagaagataacgaacaaaaacaattgtttgtggagcagcataagcattatttagatgagattattgagcaaatcagtgaattttctaagcgtgttattttagcagatgccaatttagataaagttcttagtgcatataacaaacatagagacaaaccaatacgtgaacaagcagaaaatattattcatttatttacgttgacgaatcttggagctcccgctgcttttaaatattttgatacaacaattgatcgtaaacgatatacgtctacaaaagaagttttagatgccactcttatccatcaatccatcactggtctttatgaaacacgcattgatttgagtcagctaggaggtgactga

SEQ ID NO: 318 - protein, 1367 aa, Streptococcus pyogenes
MDKKYSIGLDIGTNSVGWAVITDDYKVPSKKFKVLGNTDRHSIKKNLIGALLFGSGETAEATRLKRTARRRYTRRKNRICYLQEIFSNEMAKVDDSFFHRLEESFLVEEDKKHERHPIFGNIVDEVAYHEKYPTIYHLRKKLADSTDKADLRLIYLALAHMIKFRGHFLIEGDLNPDNSDVDKLFIQLVQIYNQLFEENPINASRVDAKAILSARLSKSRRLENLIAQLPGEKRNGLFGNLIALSLGLTPNFKSNFDLAEDAKLQLSKDTYDDDLDNLLAQIGDQYADLFLAAKNLSDAILLSDILRVNSEITKAPLSASMIKRYDEHHQDLTLLKALVRQQLPEKYKEIFFDQSKNGYAGYIDGGASQEEFYKFIKPILEKMDGTEELLVKLNREDLLRKQRTFDNGSIPHQIHLGELHAILRRQEDFYPFLKDNREKIEKILTFRIPYYVGPLARGNSRFAWMTRKSEETITPWNFEEVVDKGASAQSFIERMTNFDKNLPNEKVLPKHSLLYEYFTVYNELTKVKYVTEGMRKPAFLSGEQKKAIVDLLFKTNRKVTVKQLKEDYFKKIECFDSVEISGVEDRFNASLGAYHDLLKIIKDKDFLDNEENEDILEDIVLTLTLFEDRGMIEERLKTYAHLFDDKVMKQLKRRRYTGWGRLSRKLINGIRDKQSGKTILDFLKSDGFANRNFMQLIHDDSLTFKEDIQKAQVSGQGHSLHEQIANLAGSPAIKKGILQTVKIVDELVKVMGHKPENIVIEMARENQTTQKGQKNSRERMKRIEEGIKELGSQILKEHPVENTQLQNEKLYLYYLQNGRDMYVDQELDINRLSDYDVDHIVPQSFIKDDSIDNKVLTRSDKNRGKSDNVPSEEVVKKMKNYWRQLLNAKLITQRKFDNLTKAERGGLSELDKAGFIKRQLVETRQITKHVAQILDSRMNTKYDENDKLIREVKVITLKSKLVSDFRKDFQFYKVREINNYHHAHDAYLNAVVGTALIKKYPKLESEFVYGDYKVYDVRKMIAKSEQEIGKATAKYFFYSNIMNFFKTEITLANGEIRKRPLIETNGETGEIVWDKGRDFATVRKVLSMPQVNIVKKTEVQTGGFSKESILPKRNSDKLIARKKDWDPKKYGGFDSPTVAYSVLVVAKVEKGKSKKLKSVKELLGITIMERSSFEKNPIDFLEAKGYKEVKKDLIIKLPKYSLFELENGRKRMLASAGELQKGNELALPSKYVNFLYLASHYEKLKGSPEDNEQKQLFVEQHKHYLDEIIEQISEFSKRVILADANLDKVLSAYNKHRDKPIREQAENIIHLFTLTNLGAPAAFKYFDTTIDRKRYTSTKEVLDATLIHQSITGLYETRIDLSQLGGD

SEQ ID NO: 319 - DNA, 4212 bp, Streptococcus pyogenes
atggataaaaagtattctattggtttagacatcggcactaattccgttggatgggctgtcataaccgatgaatacaaagtaccttcaaagaaatttaaggtgttggggaacacagaccgtcattcgattaaaaagaatcttatcggtgccctcctattcgatagtggcgaaacggcagaggcgactcgcctgaaacgaaccgctcggagaaggtatacacgtcgcaagaaccgaatatgttacttacaagaaatttttagcaatgagatggccaaagttgacgattctttctttcaccgtttggaagagtccttccttgtcgaagaggacaagaaacatgaacggcaccccatctttggaaacatagtagatgaggtggcatatcatgaaaagtacccaacgatttatcacctcagaaaaaagctagttgactcaactgataaagcggacctgaggttaatctacttggctcttgcccatatgataaagttccgtgggcactttctcattgagggtgatctaaatccggacaactcggatgtcgacaaactgttcatccagttagtacaaacctataatcagttgtttgaagagaaccctataaatgcaagtggcgtggatgcgaaggctattcttagcgcccgcctctctaaatcccgacggctagaaaacctgatcgcacaattacccggagagaagaaaaatgggttgttcggtaaccttatagcgctctcactaggcctgacaccaaattttaagtcgaacttcgacttagctgaagatgccaaattgcagcttagtaaggacacgtacgatgacgatctcgacaatctactggcacaaattggagatcagtatgcggacttatttttggctgccaaaaaccttagcgatgcaatcctcctatctgacatactgagagttaatactgagattaccaaggcgccgttatccgcttcaatgatcaaaaggtacgatgaacatcaccaagacttgacacttctcaaggccctagtccgtcagcaactgcctgagaaatataaggaaatattctttgatcagtcgaaaaacgggtacgcaggttatattgacggcggagcgagtcaagaggaattctacaagtttatcaaacccatattagagaagatggatgggacggaagagttgcttgtaaaactcaatcgcgaagatctactgcgaaagcagcggactttcgacaacggtagcattccacatcaaatccacttaggcgaattgcatgctatacttagaaggcaggaggatttttatccgttcctcaaagacaatcgtgaaaagattgagaaaatcctaacctttcgcataccttactatgtgggacccctggcccgagggaactctcggttcgcatggatgacaagaaagtccgaagaaacgattactccatggaattttgaggaagttgtcgataaaggtgcgtcagctcaatcgttcatcgagaggatgaccaactttgacaagaatttaccgaacgaaaaagtattgcctaagcacagtttactttacgagtatttcacagtgtacaatgaactcacgaaagttaagtatgtcactgagggcatgcgtaaacccgcctttctaagcggagaacagaagaaagcaatagtagatctgttattcaagaccaaccgcaaagtgacagttaagcaattgaaagaggactactttaagaaaattgaatgcttcgattctgtcgagatctccggggtagaagatcgatttaatgcgtcacttggtacgtatcatgacctcctaaagataattaaagataaggacttcctggataacgaagagaatgaagatatcttagaagatatagtgttgactcttaccctctttgaagatcgggaaatgattgaggaaagactaaaaacatacgctcacctgttcgacgataaggttatgaaacagttaaagaggcgtcgctatacgggctggggacgattgtcgcggaaacttatcaacgggataagagacaagcaaagtggtaaaactattctcgattttctaaagagcgacggcttcgccaataggaactttatgcagctgatccatgatgactctttaaccttcaaagaggatatacaaaaggcacaggtttccggacaaggggactcattgcacgaacatattgcgaatcttgctggttcgccagccatcaaaaagggcatactccagacagtcaaagtagtggatgagctagttaaggtcatgggacgtcacaaaccggaaaacattgtaatcgagatggcacgcgaaaatcaaacgactcagaaggggcaaaaaaacagtcgagagcggatgaagagaatagaagagggtattaaagaactgggcagccagatcttaaaggagcatcctgtggaaaatacccaattgcagaacgagaaactttacctctattacctacaaaatggaagggacatgtatgttgatcaggaactggacataaaccgtttatctgattacgacgtcgatcacattgtaccccaatcctttttgaaggacgattcaatcgacaataaagtgcttacacgctcggataagaaccgagggaaaagtgacaatgttccaagcgaggaagtcgtaaagaaaatgaagaactattggcggcagctcctaaatgcgaaactgataacgcaaagaaagttcgataacttaactaaagctgagaggggtggcttgtctgaacttgacaaggccggatttattaaacgtcagctcgtggaaacccgccaaatcacaaagcatgttgcacagatactagattcccgaatgaatacgaaatacgacgagaacgataagctgattcgggaagtcaaagtaatcactttaaagtcaaaattggtgtcggacttcagaaaggattttcaattctataaagttagggagataaataactaccaccatgcgcacgacgcttatcttaatgccgtcgtagggaccgcactcattaagaaatacccgaagctagaaagtgagtttgtgtatggtgattacaaagtttatgacgtccgtaagatgatcgcgaaaagcgaacaggagataggcaaggctacagccaaatacttcttttattctaacattatgaatttctttaagacggaaatcactctggcaaacggagagatacgcaaacgacctttaattgaaaccaatggggagacaggtgaaatcgtatgggataagggccgggacttcgcgacggtgagaaaagttttgtccatgccccaagtcaacatagtaaagaaaactgaggtgcagaccggagggttttcaaaggaatcgattcttccaaaaaggaatagtgataagctcatcgctcgtaaaaaggactgggacccgaaaaagtacggtggcttcgatagccctacagttgcctattctgtcctagtagtggcaaaagttgagaagggaaaatccaagaaactgaagtcagtcaaagaattattggggataacgattatggagcgctcgtcttttgaaaagaaccccatcgacttccttgaggcgaaaggttacaaggaagtaaaaaaggatctcataattaaactaccaaagtatagtctgtttgagttagaaaatggccgaaaacggatgttggctagcgccggagagcttcaaaaggggaacgaactcgcactaccgtctaaatacgtgaatttcctgtatttagcgtcccattacgagaagttgaaaggttcacctgaagataacgaacagaagcaactttttgttgagcagcacaaacattatctcgacgaaatcatagagcaaatttcggaattcagtaagagagtcatcctagctgatgccaatctggacaaagtattaagcgcatacaacaagcacagggataaacccatacgtgagcaggcggaaaatattatccatttgtttactcttaccaacctcggcgctccagccgcattcaagtattttgacacaacgatagatcgcaaacgatacacttctaccaaggaggtgctagacgcgacactgattcaccaatccatcacgggattatatgaaactcggatagatttgtcacagcttgggggtgacggatcccccaagaagaagaggaaagtctcgagcgactacaaagaccatgacggtgattataaagatcatgacatcgattacaaggatgacgatgacaaggctgcagga

SEQ ID NO: 320 - protein, 1404 aa, Streptococcus pyogenes
MDKKYSIGLDIGTNSVGWAVITDEYKVPSKKFKVLGNTDRHSIKKNLIGALLFDSGETAEATRLKRTARRRYTRRKNRICYLQEIFSNEMAKVDDSFFHRLEESFLVEEDKKHERHPIFGNIVDEVAYHEKYPTIYHLRKKLVDSTDKADLRLIYLALAHMIKFRGHFLIEGDLNPDNSDVDKLFIQLVQTYNQLFEENPINASGVDAKAILSARLSKSRRLENLIAQLPGEKKNGLFGNLIALSLGLTPNFKSNFDLAEDAKLQLSKDTYDDDLDNLLAQIGDQYADLFLAAKNLSDAILLSDILRVNTEITKAPLSASMIKRYDEHHQDLTLLKALVRQQLPEKYKEIFFDQSKNGYAGYIDGGASQEEFYKFIKPILEKMDGTEELLVKLNREDLLRKQRTFDNGSIPHQIHLGELHAILRRQEDFYPFLKDNREKIEKILTFRIPYYVGPLARGNSRFAWMTRKSEETITPWNFEEVVDKGASAQSFIERMTNFDKNLPNEKVLPKHSLLYEYFTVYNELTKVKYVTEGMRKPAFLSGEQKKAIVDLLFKTNRKVTVKQLKEDYFKKIECFDSVEISGVEDRFNASLGTYHDLLKIIKDKDFLDNEENEDILEDIVLTLTLFEDREMIEERLKTYAHLFDDKVMKQLKRRRYTGWGRLSRKLINGIRDKQSGKTILDFLKSDGFANRNFMQLIHDDSLTFKEDIQKAQVSGQGDSLHEHIANLAGSPAIKKGILQTVKVVDELVKVMGRHKPENIVIEMARENQTTQKGQKNSRERMKRIEEGIKELGSQILKEHPVENTQLQNEKLYLYYLQNGRDMYVDQELDINRLSDYDVDHIVPQSFLKDDSIDNKVLTRSDKNRGKSDNVPSEEVVKKMKNYWRQLLNAKLITQRKFDNLTKAERGGLSELDKAGFIKRQLVETRQITKHVAQILDSRMNTKYDENDKLIREVKVITLKSKLVSDFRKDFQFYKVREINNYHHAHDAYLNAVVGTALIKKYPKLESEFVYGDYKVYDVRKMIAKSEQEIGKATAKYFFYSNIMNFFKTEITLANGEIRKRPLIETNGETGEIVWDKGRDFATVRKVLSMPQVNIVKKTEVQTGGFSKESILPKRNSDKLIARKKDWDPKKYGGFDSPTVAYSVLVVAKVEKGKSKKLKSVKELLGITIMERSSFEKNPIDFLEAKGYKEVKKDLIIKLPKYSLFELENGRKRMLASAGELQKGNELALPSKYVNFLYLASHYEKLKGSPEDNEQKQLFVEQHKHYLDEIIEQISEFSKRVILADANLDKVLSAYNKHRDKPIREQAENIIHLFTLTNLGAPAAFKYFDTTIDRKRYTSTKEVLDATLIHQSITGLYETRIDLSQLGGDGSPKKKRKVSSDYKDHDGDYKDHDIDYKDDDDKAAG

SEQ ID NO: 321 - DNA, 4107 bp, Streptococcus pyogenes
atggataagaaatactcaataggcttagatatcggcacaaatagcgtcggatgggcggtgatcactgatgaatataaggttccgtctaaaaagttcaaggttctgggaaatacagaccgccacagtatcaaaaaaaatcttataggggctcttttatttgacagtggagagacagcggaagcgactcgtctcaaacggacagctcgtagaaggtatacacgtcggaagaatcgtatttgttatctacaggagattttttcaaatgagatggcgaaagtagatgatagtttctttcatcgacttgaagagtcttttttggtggaagaagacaagaagcatgaacgtcatcctatttttggaaatatagtagatgaagttgcttatcatgagaaatatccaactatctatcatctgcgaaaaaaattggtagattctactgataaagcggatttgcgcttaatctatttggccttagcgcatatgattaagtttcgtggtcattttttgattgagggagatttaaatcctgataatagtgatgtggacaaactatttatccagttggtacaaacctacaatcaattatttgaagaaaaccctattaacgcaagtggagtagatgctaaagcgattctttctgcacgattgagtaaatcaagacgattagaaaatctcattgctcagctccccggtgagaagaaaaatggcttatttgggaatctcattgctttgtcattgggtttgacccctaattttaaatcaaattttgatttggcagaagatgctaaattacagctttcaaaagatacttacgatgatgatttagataatttattggcgcaaattggagatcaatatgctgatttgtttttggcagctaagaatttatcagatgctattttactttcagatatcctaagagtaaatactgaaataactaaggctcccctatcagcttcaatgattaaacgctacgatgaacatcatcaagacttgactcttttaaaagctttagttcgacaacaacttccagaaaagtataaagaaatcttttttgatcaatcaaaaaacggatatgcaggttatattgatgggggagctagccaagaagaattttataaatttatcaaaccaattttagaaaaaatggatggtactgaggaattattggtgaaactaaatcgtgaagatttgctgcgcaagcaacggacctttgacaacggctctattccccatcaaattcacttgggtgagctgcatgctattttgagaagacaagaagacttttatccatttttaaaagacaatcgtgagaagattgaaaaaatcttgacttttcgaattccttattatgttggtccattggcgcgtggcaatagtcgttttgcatggatgactcggaagtctgaagaaacaattaccccatggaattttgaagaagttgtcgataaaggtgcttcagctcaatcatttattgaacgcatgacaaactttgataaaaatcttccaaatgaaaaagtactaccaaaacatagtttgctttatgagtattttacggtttataacgaattgacaaaggtcaaatatgttactgaaggaatgcgaaaaccagcatttctttcaggtgaacagaagaaagccattgttgatttactcttcaaaacaaatcgaaaagtaaccgttaagcaattaaaagaagattatttcaaaaaaatagaatgttttgatagtgttgaaatttcaggagttgaagatagatttaatgcttcattaggtacctaccatgatttgctaaaaattattaaagataaagattttttggataatgaagaaaatgaagatatcttagaggatattgttttaacattgaccttatttgaagatagggagatgattgaggaaagacttaaaacatatgctcacctctttgatgataaggtgatgaaacagcttaaacgtcgccgttatactggttggggacgtttgtctcgaaaattgattaatggtattagggataagcaatctggcaaaacaatattagattttttgaaatcagatggttttgccaatcgcaattttatgcagctgatccatgatgatagtttgacatttaaagaagacattcaaaaagcacaagtgtctggacaaggcgatagtttacatgaacatattgcaaatttagctggtagccctgctattaaaaaaggtattttacagactgtaaaagttgttgatgaattggtcaaagtaatggggcggcataagccagaaaatatcgttattgaaatggcacgtgaaaatcagacaactcaaaagggccagaaaaattcgcgagagcgtatgaaacgaatcgaagaaggtatcaaagaattaggaagtcagattcttaaagagcatcctgttgaaaatactcaattgcaaaatgaaaagctctatctctattatctccaaaatggaagagacatgtatgtggaccaagaattagatattaatcgtttaagtgattatgatgtcgatcacattgttccacaaagtttccttaaagacgattcaatagacaataaggtcttaacgcgttctgataaaaatcgtggtaaatcggataacgttccaagtgaagaagtagtcaaaaagatgaaaaactattggagacaacttctaaacgccaagttaatcactcaacgtaagtttgataatttaacgaaagctgaacgtggaggtttgagtgaacttgataaagctggttttatcaaacgccaattggttgaaactcgccaaatcactaagcatgtggcacaaattttggatagtcgcatgaatactaaatacgatgaaaatgataaacttattcgagaggttaaagtgattaccttaaaatctaaattagtttctgacttccgaaaagatttccaattctataaagtacgtgagattaacaattaccatcatgcccatgatgcgtatctaaatgccgtcgttggaactgctttgattaagaaatatccaaaacttgaatcggagtttgtctatggtgattataaagtttatgatgttcgtaaaatgattgctaagtctgagcaagaaataggcaaagcaaccgcaaaatatttcttttactctaatatcatgaacttcttcaaaacagaaattacacttgcaaatggagagattcgcaaacgccctctaatcgaaactaatggggaaactggagaaattgtctgggataaagggcgagattttgccacagtgcgcaaagtattgtccatgccccaagtcaatattgtcaagaaaacagaagtacagacaggcggattctccaaggagtcaattttaccaaaaagaaattcggacaagcttattgctcgtaaaaaagactgggatccaaaaaaatatggtggttttgatagtccaacggtagcttattcagtcctagtggttgctaaggtggaaaaagggaaatcgaagaagttaaaatccgttaaagagttactagggatcacaattatggaaagaagttcctttgaaaaaaatccgattgactttttagaagctaaaggatataaggaagttaaaaaagacttaatcattaaactacctaaatatagtctttttgagttagaaaacggtcgtaaacggatgctggctagtgccggagaattacaaaaaggaaatgagctggctctgccaagcaaatatgtgaattttttatatttagctagtcattatgaaaagttgaagggtagtccagaagataacgaacaaaaacaattgtttgtggagcagcataagcattatttagatgagattattgagcaaatcagtgaattttctaagcgtgttattttagcagatgccaatttagataaagttcttagtgcatataacaaacatagagacaaaccaatacgtgaacaagcagaaaatattattcatttatttacgttgacgaatcttggagctcccgctgcttttaaatattttgatacaacaattgatcgtaaacgatatacgtctacaaaagaagttttagatgccactcttatccatcaatccatcactggtctttatgaaacacgcattgatttgagtcagctaggaggtgactga

SEQ ID NO: 322 - protein, 1368 aa, Streptococcus pyogenes [sequence omitted]

SEQ ID NO: 323 - protein, 1378 aa, Lactobacillus fermentum
MKEYHIGLDIGTSSIGWAVTDSQFKLMRIKGKTAIGVRLFEEGKTAAERRTFRTTRRRLKRRKWRLHYLDEIFAPHLQEVDENFLRRLKQSNIHPEDPTKNQAFIGKLLFPDLLKKNERGYPTLIKMRDELPVEQRAHYPVMNIYKLREAMINEDRQFDLREVYLAVHHIVKYRGHFLNNASVDKFKVGRIDFDKSFNVLNEAYEELQNGEGSFTIEPSKVEKIGQLLLDTKMRKLDRQKAVAKLLEVKVADKEETKRNKQIATAMSKLVLGYKADFATVAMANGNEWKIDLSSETSEDEIEKFREELSDAQNDILTEITSLFSQIMLNEIVPNGMSISESMMDRYWTHERQLAEVKEYLATQPASARKEFDQVYNKYIGQAPKERGFDLEKGLKKILSKKENWKEIDELLKAGDFLPKQRTSANGVIPHQMHQQELDRIIEKQAKYYPWLATENPATGERDRHQAKYELDQLVSFRIPYYVGPLVTPEVQKATSGAKFAWAKRKEDGEITPWNLWDKIDRAESAEAFIKRMTVKDTYLLNEDVLPANSLLYQKYNVLNELNNVRVNGRRLSVGIKQDIYTELFKKKKTVKASDVASLVMAKTRGVNKPSVEGLSDPKKFNSNLATYLDLKSIVGDKVDDNRYQTDLENIIEWRSVFEDGEIFADKLTEVEWLTDEQRSALVKKRYKGWGRLSKKLLTGIVDENGQRIIDLMWNTDQNFKEIVDQPVFKEQIDQLNQKAITNDGMTLRERVESVLDDAYTSPQNKKAIWQVVRVVEDIVKAVGNAPKSISIEFARNEGNKGEITRSRRTQLQKLFEDQAHELVKDTSLTEELEKAPDLSDRYYFYFTQGGKDMYTGDPINFDEISTKYDIDHILPQSFVKDNSLDNRVLTSRKENNKKSDQVPAKLYAAKMKPYWNQLLKQGLITQRKFENLTKDVDQNIKYRSLGFVKRQLVETRQVIKLTANILGSMYQEAGTEIIETRAGLTKQLREEFDLPKVREVNDYHHAVDAYLTTFAGQYLNRRYPKLRSFFVYGEYMKFKHGSDLKLRNFNFFHELMEGDKSQGKVVDQQTGELITTRDEVAKSFDRLLNMKYMLVSKEVHDRSDQLYGATIVTAKESGKLTSPIEIKKNRLVDLYGAYTNGTSAFMTIIKFTGNKPKYKVIGIPTTSAASLKRAGKPGSESYNQELHRIIKSNPKVKKGFEIVVPHVSYGQLIVDGDCKFTLASPTVQHPATQLVLSKKSLETISSGYKILKDKPAIANERLIRVFDEVVGQMNRYFTIFDQRSNRQKVADARDKFLSLPTESKYEGAKKVQVGKTEVITNLLMGLHANATQGDLKVLGLATFGFFQSTTGLSLSEDTMIVYQSPTGLFERRICLKDI

SEQ ID NO: 324 - protein, 1368 aa, Staphylococcus aureus [sequence omitted]

SEQ ID NO: 325 - protein, 1053 aa, Staphylococcus aureus
MGKRNYILGLDIGITSVGYGIIDYETRDVIDAGVRLFKEANVENNEGRRSKRGARRLKRRRRHRIQRVKKLLFDYNLLTDHSELSGINPYEARVKGLSQKLSEEEFSAALLHLAKRRGVHNVNEVEEDTGNELSTKEQISRNSKALEEKYVAELQLERLKKDGEVRGSINRFKTSDYVKEAKQLLKVQKAYHQLDQSFIDTYIDLLETRRTYYEGPGEGSPFGWKDIKEWYEMLMGHCTYFPEELRSVKYAYNADLYNALNDLNNLVITRDENEKLEYYEKFQIIENVFKQKKKPTLKQIAKEILVNEEDIKGYRVTSTGKPEFTNLKVYHDIKDITARKEIIENAELLDQIAKILTIYQSSEDIQEELTNLNSELTQEEIEQISNLKGYTGTHNLSLKAINLILDELWHTNDNQIAIFNRLKLVPKKVDLSQQKEIPTTLVDDFILSPVVKRSFIQSIKVINAIIKKYGLPNDIIIELAREKNSKDAQKMINEMQKRNRQTNERIEEIIRTTGKENAKYLIEKIKLHDMQEGKCLYSLEAIPLEDLLNNPFNYEVDHIIPRSVSFDNSFNNKVLVKQEENSKKGNRTPFQYLSSSDSKISYETFKKHILNLAKGKGRISKTKKEYLLEERDINRFSVQKDFINRNLVDTRYATRGLMNLLRSYFRVNNLDVKVKSINGGFTSFLRRKWKFKKERNKGYKHHAEDALIIANADFIFKEWKKLDKAKKVMENQMFEEKQAESMPEIETEQEYKEIFITPHQIKHIKDFKDYKYSHRVDKKPNRKLINDTLYSTRKDDKGNTLIVNNLNGLYDKDNDKLKKLINKSPEKLLMYHHDPQTYQKLKLIMEQYGDEKNPLYKYYEETGNYLTKYSKKDNGPVIKKIKYYGNKLNAHLDITDDYPNSRNKVVKLSLKPYRFDVYLDNGVYKFVTVKNLDVIKKENYYEVNSKCYEEAKKLKKISNQAEFIASFYKNDLIKINGELYRVIGVNNDLLNRIEVNMIDITYREYLENMNDKRPPHIIKTIASKTQSIKKYSTDILGNLYEVKSKKHPQIIKK

SEQ ID NO: 326 - protein, 1409 aa, Streptococcus thermophilus
MLFNKCIIISINLDFSNKEKCMTKPYSIGLDIGTNSVGWAVITDNYKVPSKKMKVLGNTSKKYIKKNLLGVLLFDSGITAEGRRLKRTARRRYTRRRNRILYLQEIFSTEMATLDDAFFQRLDDSFLVPDDKRDSKYPIFGNLVEEKVYHDEFPTIYHLRKYLADSTKKADLRLVYLALAHMIKYRGHFLIEGEFNSKNNDIQKNFQDFLDTYNAIFESDLSLENSKQLEEIVKDKISKLEKKDRILKLFPGEKNSGIFSEFLKLIVGNQADFRKCFNLDEKASLHFSKESYDEDLETLLGYIGDDYSDVFLKAKKLYDAILLSGFLTVTDNETEAPLSSAMIKRYNEHKEDLALLKEYIRNISLKTYNEVFKDDTKNGYAGYIDGKTNQEDFYVYLKNLLAEFEGADYFLEKIDREDFLRKQRTFDNGSIPYQIHLQEMRAILDKQAKFYPFLAKNKERIEKILTFRIPYYVGPLARGNSDFAWSIRKRNEKITPWNFEDVIDKESSAEAFINRMTSFDLYLPEEKVLPKHSLLYETFNVYNELTKVRFIAESMRDYQFLDSKQKKDIVRLYFKDKRKVTDKDIIEYLHAIYGYDGIELKGIEKQFNSSLSTYHDLLNIINDKEFLDDSSNEAIIEEIIHTLTIFEDREMIKQRLSKFENIFDKSVLKKLSRRHYTGWGKLSAKLINGIRDEKSGNTILDYLIDDGISNRNFMQLIHDDALSFKKKIQKAQIIGDEDKGNIKEVVKSLPGSPAIKKGILQSIKIVDELVKVMGGRKPESIVVEMARENQYTNQGKSNSQQRLKRLEKSLKELGSKILKENIPAKLSKIDNNALQNDRLYLYYLQNGKDMYTGDDLDIDRLSNYDIDHIIPQAFLKDNSIDNKVLVSSASNRGKSDDFPSLEVVKKRKTFWYQLLKSKLISQRKFDNLTKAERGGLLPEDKAGFIQRQLVETRQITKHVARLLDEKFNNKKDENNRAVRTVKIITLKSTLVSQFRKDFELYKVREINDFHHAHDAYLNAVIASALLKKYPKLEPEFVYGDYPKYNSFRERKSATEKVYFYSNIMNIFKKSISLADGRVIERPLIEVNEETGESVWNKESDLATVRRVLSYPQVNVVKKVEEQNHGLDRGKPKGLFNANLSSKPKPNSNENLVGAKEYLDPKKYGGYAGISNSFAVLVKGTIEKGAKKKITNVLEFQGISILDRINYRKDKLNFLLEKGYKDIELIIELPKYSLFELSDGSRRMLASILSTNNKRGEIHKGNQIFLSQKFVKLLYHAKRISNTINENHRKYVENHKKEFEELFYYILEFNENYVGAKKNGKLLNSAFQSWQNHSIDELCSSFIGPTGSERKGLFELTSRGSAADFEFLGVKIPRYRDYTPSSLLKDATLIHQSVTGLYETRIDLAKLGEG

SEQ ID NO: 327 - protein, 1402 aa, Lactobacillus crispatus
MKIKNYNLALTPSTSAVGHVEVDDDLNILEPVHHQKAIGVAKFGEGETAEARRLARSARRTTKRRANRINHYFNEIMKPEIDKVDPLMFDRIKQAGLSPLDERKEFRTVIFDRPNIASYYHNQFPTIWHLQKYLMITDEKADIRLIYWALHSLLKHRGHFFNTTPMSQFKPGKLNLKDDMLALDDYNDLEGLSFAVANSPEIEKVIKDRSMHKKEKIAELKKLIVNDVPDKDLAKRNNKIITQIVNAIMGNSFHLNFIFDMDLDKLTSKAWSFKLDDPELDTKFDAISGSMTDNQIGIFETLQKIYSAISLLDILNGSSNVVDAKNALYDKHKRDLNLYFKFLNTLPDEIAKTLKAGYTLYIGNRKKDLLAARKLLKVNVAKNFSQDDFYKLINKELKSIDKQGLQTRFSEKVGELVAQNNFLPVQRSSDNVFIPYQLNAITFNKILENQGKYYDFLVKPNPAKKDRKNAPYELSQLMQFTIPYYVGPLVTPEEQVKSGIPKTSRFAWMVRKDNGAITPWNFYDKVDIEATADKFIKRSIAKDSYLLSELVLPKHSLLYEKYEVFNELSNVSLDGKKLSGGVKQILFNEVFKKTNKVNTSRILKALAKHNIPGSKITGLSNPEEFTSSLQTYNAWKKYFPNQIDNFAYQQDLEKMIEWSTVFEDHKILAKKLDEIEWLDDDQKKFVANTRLRGWGRLSKRLLTGLKDNYGKSIMQRLETTKANFQQIVYKPEFREQIDKISQAAAKNQSLEDILANSYTSPSNRKAIRKTMSVVDEYIKLNHGKEPDKIFLMFQRSEQEKGKQTEARSKQLNRILSQLKADKSANKLFSKQLADEFSNAIKKSKYKLNDKQYFYFQQLGRDALTGEVIDYDELYKYTVLHIIPRSKLTDDSQNNKVLTKYKIVDGSVALKFGNSYSDALGMPIKAFWTELNRLKLIPKGKLLNLTTDFSTLNKYQRDGYIARQLVETQQIVKLLATIMQSRFKHTKIIEVRNSQVANIRYQFDYFRIKNLNEYYRGFDAYLAAVVGTYLYKVYPKARRLFVYGQYLKPKKTNQENQDMHLDSEKKSQGFNFLWNLLYGKQDQIFVNGTDVIAFNRKDLITKMNTVYNYKSQKISLAIDYHNGAMFKATLFPRNDRDTAKTRKLIPKKKDYDTDIYGGYTSNVDGYMLLAEIIKRDGNKQYGFYGVPSRLVSELDTLKKTRYTEYEEKLKEIIKPELGVDLKKIKKIKILKNKVPFNQVIIDKGSKFFITSTSYRWNYRQLILSAESQQTLMDLVVDPDFSNHKARKDARKNADERLIKVYEEILYQVKNYMPMFVELHRCYEKLVDAQKTFKSLKISDKAMVLNQILILLHSNATSPVLEKLGYHTRFTLGKKHNLISENAVLVTQSITGLKENHVSIKQML

SEQ ID NO: 328 - protein, 1385 aa, Pedicoccus damnosus
MTNEKYSIGLDIGTSSIGFAVVNDNNRVIRVKGKNAIGVRLFDEGKAAADRRSFRTTRRSFRTTRRRLSRRRWRLKLLREIFDAYITPVDEAFFIRLKESNLSPKDSKKQYSGDILFNDRSDKDFYEKYPTIYHLRNALMTEHRKFDVREIYLAIHHIMKFRGHFLNATPANNFKVGRLNLEEKFEELNDIYQRVFPDESIEFRTDNLEQIKEVLLDNKRSRADRQRTLVSDIYQSSEDKDIEKRNKAVATEILKASLGNKAKLNVITNVEVDKEAAKEWSITFDSESIDDDLAKIEGQMTDDGHEIIEVLRSLYSGITLSAIVPENHTLSQSMVAKYDLHKDHLKLFKKLINGMTDTKKAKNLRAAYDGYIDGVKGKVLPQEDFYKQVQVNLDDSAEANEIQTYIDQDIFMPKQRTKANGSIPHQLQQQELDQIIENQKAYYPWLAELNPNPDKKRQQLAKYKLDELVTFRVPYYVGPMITAKDQKNQSGAEFAWMIRKEPGNITPWNFDQKVDRMATANQFIKRMTTTDTYLLGEDVLPAQSLLYQKFEVLNELNKIRIDHKPISIEQKQQIFNDLFKQFKNVTIKHLQDYLVSQGQYSKRPLIEGLADEKRFNSSLSTYSDLCGIFGAKLVEENDRQEDLEKIIEWSTIFEDKKIYRAKLNDLTWLTDDQKEKLATKRYQGWGRLSRKLLVGLKNSEHRNIMDILWITNENFMQIQAEPDFAKLVTDANKGMLEKTDSQDVINDLYTSPQNKKAIRQILLVVHDIQNAMHGQAPAKIHVEFARGEERNPRRSVQRQRQVEAAYEKVSNELVSAKVRQEFKEAINNKRDFKDRLFLYFMQGGIDIYTGKQLNIDQLSSYQIDHILPQAFVKDDSLTNRVLTNENQVKADSVPIDIFGKKMLSVWGRMKDQGLISKGKYRNLTMNPENISAHTENGFINRQLVETRQVIKLAVNILADEYGDSTQIISVKADLSHQMREDFELLKNRDVNDYHHAFDAYLAAFIGNYLLKRYPKLESYFVYGDFKKFTQKETKMRRFNFIYDLKHCDQVVNKETGEILWTKDEDIKYIRHLFAYKKILVSHEVREKRGALYNQTIYKAKDDKGSGQESKKLIRIKDDKETKIYGGYSGKSLAYMTIVQITKKNKVSYRVIGIPTLALARLNKLENDSTENNGELYKIIKPQFTHYKVDKKNGEIIETTDDFKIVVSKVRFQQLIDDAGQFFMLASDTYKNNAQQLVISNNALKAINNTNITDCPRDDLERLDNLRLDSAFDEIVKKMDKYFSAYDANNFREKIRNSNLIFYQLPVEDQWENNKITELGKRTVLTRILQGLHANATTTDMSIFKIKTPFGQLRQRSGISLSENAQLIYQSPTGLFERRVQLNKIK

SEQ ID NO: 329 - protein, 1367 aa, Fusobaterium nucleatum
MKKQKFSDYYLGFDIGTNSVGWCVTDLDYNVLRFNKKDMWGSRLFEEAKTAAERRVQRNSRRRLKRRKWRLNLLEEIFSNEILKIDSNFFRRLKESSLWLEDKSSKEKFTLFNDDNYKDYDFYKQYPTIFHLRNELIKNPEKKDIRLVYLAIHSIFKSRGHFLFEGQNLKEIKNFETLYNNLIAFLEDNGINKIIDKNNIEKLEKIVCDSKKGLKDKEKEFKEIFNSDKQLVAIFKLSVGSSVSLNDLFDTDEYKKGEVEKEKISFREQIYEDDKPIYYSILGEKIELLDIAKTFYDFMVLNNILADSQYISEAKVKLYEEHKKDLKNLKYIIRKYNKGNYDKLFKDKNENNYSAYIGLNKEKSKKEVIEKSRLKIDDLIKNIKGYLPKVEEIEEKDKAIFNKILNKIELKTILPKQRISDNGTLPYQIHEAELEKILENQSKYYDFLNYEENGIITKDKLLMTFKFRIPYYVGPLNSYHKDKGGNSWIVRKEEGKILPWNFEQKVDIEKSAEEFIKRMTNKCTYLNGEDVIPKDTFLYSEYVILNELNKVQVNDEFLNEENKRKIIDELFKENKKVSEKKFKEYLLVKQIVDGTIELKGVKDSFNSNYISYIRFKDIFGEKLNLDIYKEISEKSILWKCLYGDDKKIFEKKIKNEYGDILTKDEIKKINTFKFNNWGRLSEKLLTGIEFINLETGECYSSVMDALRRTNYNLMELLSSKFTLQESINNENKEMNEASYRDLIEESYVSPSLKRAIFQTLKIYEEIRKITGRVPKKVFIEMARGGDESMKNKKIPARQEQLKKLYDSCGNDIANFSIDIKEMKNSLISYDNNSLRQKKLYLYYLQFGKCMYTGREIDLDRLLQNNDTYDIDHIYPRSKVIKDDSFDNLVLVLKNENAEKSNEYPVKKEIQEKMKSFWRFLKEKNFISDEKYKRLTGKDDFELRGFMARQLVNVRQTTKEVGKILQQIEPEIKIVYSKAEIASSFREMFDFIKVRELNDTHHAKDAYLNIVAGNVYNTKFTEKPYRYLQEIKENYDVKKIYNYDIKNAWDKENSLEIVKKNMEKNTVNITRFIKEKKGQLFDLNPIKKGETSNEIISIKPKVYNGKDDKLNEKYGYYKSLNPAYFLYVEHKEKNKRIKSFERVNLVDVNNIKDEKSLVKYLIENKKLVEPRVIKKVYKRQVILINDYPYSIVTLDSNKLMDFENLKPLFLENKYEKILKNVIKFLEDNQGKSEENYKFIYLKKKDRYEKNETLESVKDRYNLEFNEMYDKFLEKLDSKDYKNYMNNKKYQELLDVKEKFIKLNLFDKAFTLKSFLDLFNRKTMADFSKVGLTKYLGKIQKISSNVLSKNELYLLEESVTGLFVKKIKL

SEQ ID NO: 330 - protein, 1286 aa, Enterococcus cecorum
RRKQRIQILQELLGEEVLKTDPGFFHRMKESRYVVEDKRTLDGKQVELPYALFVDKDYTDKEYYKQFPTINHLIVYLMTTSDTPDIRLVYLALHYYMKNRGNFLHSGDINNVKDINDILEQLDNVLETFLDGWNLKLKSYVEDIKNIYNRDLGRGERKKAFVNTLGAKTKAEKAFCSLISGGSTNLAELFDDSSLKEIETPKIEFASSSLEDKIDGIQEALEDRFAVIEAAKRLYDWKTLTDILGDSSSLAEARVNSYQMHHEQLLELKSLVKEYLDRKVFQEVFVSLNVANNYPAYIGHTKINGKKKELEVKRTKRNDFYSYVKKQVIEPIKKKVSDEAVLTKLSEIESLIEVDKYLPLQVNSDNGVIPYQVKLNELTRIFDNLENRIPVLRENRDKIIKTFKFRIPYYVGSLNGVVKNGKCTNWMVRKEEGKIYPWNFEDKVDLEASAEQFIRRMTNKCTYLVNEDVLPKYSLLYSKYLVLSELNNLRIDGRPLDVKIKQDIYENVFKKNRKVTLKKIKKYLLKEGIITDDDELSGLADDVKSSLTAYRDFKEKLGHLDLSEAQMENIILNITLFGDDKKLLKKRLAALYPFIDDKSLNRIATLNYRDWGRLSERFLSGITSVDQETGELRTIIQCMYETQANLMQLLAEPYHFVEAIEKENPKVDLESISYRIVNDLYVSPAVKRQIWQTLLVIKDIKQVMKHDPERIFIEMAREKQESKKTKSRKQVLSEVYKKAKEYEHLFEKLNSLTEEQLRSKKIYLYFTQLGKCMYSGEPIDFENLVSANSNYDIDHIYPQSKTIDDSFNNIVLVKKSLNAYKSNHYPIDKNIRDNEKVKTLWNTLVSKGLITKEKYERLIRSTPFSDEELAGFIARQLVETRQSTKAVAEILSNWFPESEIVYSKAKNVSNFRQDFEILKVRELNDCHHAHDAYLNIVVGNAYHTKFTNSPYRFIKNKANQEYNLRKLLQKVNKIESNGVVAWVGQSENNPGTIATVKKVIRRNTVLISRMVKEVDGQLFDLTLMKKGKGQVPIKSSDERLTDISKYGGYNKATGAYFTFVKSKKRGKVVRSFEYVPLHLSKQFENNNELLKEYIEKDRGLTDVEILIPKVLINSLFRYNGSLVRITGRGDTRLLLVHEQPLYVSNSFVQQLKSVSSYKLKKSENDNAKLTKTATEKLSNIDELYDGLLRKLDLPIYSYWFSSIKEYLVESRTKYIKLSIEEKALVIFEILHLFQSDAQVPNLKILGLSTKPSRIRIQKNLKDTDKMSIIHQSPSGIFEHEIELTSL

SEQ ID NO: 331 - protein, 1312 aa, Anaerostipes hadrus
MQNGFLGITVSSEQVGWAVTNPKYELERASRKDLWGVRLFDKAETAEDRRMFRTNRRLNQRKKNRIHYLRDIFHEEVNQKDPNFFQQLDESNFCEDDRTVEFNFDTNLYKNQFPTVYHLRKYLMETKDKPDIRLVYLAFSKFMKNRGHFLYKGNLGEVMDFENSMKGFCESLEKFNIDFPTLSDEQVKEVRDILCDHKIAKTVKKKNIITITKVKSKTAKAWIGLFCGCSVPVKVLFQDIDEEIVTDPEKISFEDASYDDYIANIEKGVGIYYEAIVSAKMLFDWSILNEILGDHQLLSDAMIAEYNKHHDDLKRLQKIIKGTGSRELYQDIFINDVSGNYVCYVGHAKTMSSADQKQFYTFLKNRLKNVNGISSEDAEWIDTEIKNGTLLPKQTKRDNSVIPHQLQLREFELILDNMQEMYPFLKENREKLLKIFNFVIPYYVGPLKGVVRKGESTNWMVPKKDGVIHPWNFDEMVDKEASAECFISRMTGNCSYLFNEKVLPKNSLLYETFEVLNELNPLKINGEPISVELKQRIYEQLFLTGKKVTKKSLTKYLIKNGYDKDIELSGIDNEFHSNLKSHIDFEDYDNLSDEEVEQIILRITVFEDKQLLKDYLNREFVKLSEDERKQICSLSYKGWGNLSEMLLNGITVTDSNGVEVSVMDMLWNTNLNLMQILSKKYGYKAEIEHYNKEHEKTIYNREDLMDYLNIPPAQRRKVNQLITIVKSLKKTYGVPNKIFFKISREHQDDPKRTSSRKEQLKYLYKSLKSEDEKHLMKELDELNDHELSNDKVYLYFLQKGRCIYSGKKLNLSRLRKSNYQNDIDYIYPLSAVNDRSMNNKVLTGIQENRADKYTYFPVDSEIQKKMKGFWMELVLQGFMTKEKYFRLSRENDFSKSELVSFIEREISDNQQSGRMIASVLQYYFPESKIVFVKEKLISSFKRDFHLISSYGHNHLQAAKDAYITIVVGNVYHTKFTMDPAIYFKNHKRKDYDLNRLFLENISRDGQIAWESGPYGSIQTVRKEYAQNHIAVTKRVVEVKGGLFKQMPLKKGHGEYPLKTNDPRFGNIAQYGGYTNVTGSYFVLVESMEKGKKRISLEYVPVYLHERLEDDPGHKLLKEYLVDHRKLNHPKILLAKVRKNSLLKIDGFYYRLNGRSGNALILTNAVELIMDDWQTKTANKISGYMKRRAIDKKARVYQNEFHIQELEQLYDFYLDKLKNGVYKNRKNNQAELIHNEKEQFMELKTEDQCVLLTEIKKLFVCSPMQADLTLIGGSKHTGMIAMSSNVTKADFAVIAEDPLGLRNKVIYSHKGEK

SEQ ID NO: 332 - protein, 1344 aa, Kandleria vitulina
MSQNNNKIYNIGLDIGDASVGWAVVDEHYNLLKRHGKHMWGSRLFTQANTAVERRSSRSTRRRYNKRRERIRLLREIMEDMVLDVDPTFFIRLANVSFLDQEDKKDYLKENYHSNYNLFIDKDFNDKTYYDKYPTIYHLRKHLCESKEKEDPRLIYLALHHIVKYRGNFLYEGQKFSMDVSNIEDKMIDVLRQFNEINLFEYVEDRKKIDEVLNVLKEPLSKKHKAEKAFALFDTTKDNKAAYKELCAALAGNKFNVTKMLKEAELHDEDEKDISFKFSDATFDDAFVEKQPLLGDCVEFIDLLHDIYSWVELQNILGSAHTSEPSISAAMIQRYEDHKNDLKLLKDVIRKYLPKKYFEVFRDEKSKKNNYCNYINHPSKTPVDEFYKYIKKLIEKIDDPDVKTILNKIELESFMLKQNSRTNGAVPYQMQLDELNKILENQSVYYSDLKDNEDKIRSILTFRIPYYFGPLNITKDRQFDWIIKKEGKENERILPWNANEIVDVDKTADEFIKRMRNFCTYFPDEPVMAKNSLTVSKYEVLNEINKLRINDHLIKRDMKDKMLHTLFMDHKSISANAMKKWLVKNQYFSNTDDIKIEGFQKENACSTSLTPWIDFTKIFGKINESNYDFIEKIIYDVTVFEDKKILRRRLKKEYDLDEEKIKKILKLKYSGWSRLSKKLLSGIKTKYKDSTRTPETVLEVMERTNMNLMQVINDEKLGFKKTIDDANSTSVSGKFSYAEVQELAGSPAIKRGIWQALLIVDEIKKIMKHEPAHVYIEFARNEDEKERKDSFVNQMLKLYKDYDFEDETEKEANKHLKGEDAKSKIRSERLKLYYTQMGKCMYTGKSLDIDRLDTYQVDHIVPQSLLKDDSIDNKVLVLSSENQRKLDDLVIPSSIRNKMYGFWEKLFNNKIISPKKFYSLIKTEFNEKDQERFINRQIVETRQITKHVAQIIDNHYENTKVVTVRADLSHQFRERYHIYKNRDINDFHHAHDAYIATILGTYIGHRFESLDAKYIYGEYKRIFRNQKNKGKEMKKNNDGFILNSMRNIYADKDTGEIVWDPNYIDRIKKCFYYKDCFVTKKLEENNGTFFNVTVLPNDTNSDKDNTLATVPVNKYRSNVNKYGGFSGVNSFIVAIKGKKKKGKKVIEVNKLTGIPLMYKNADEEIKINYLKQAEDLEEVQIGKEILKNQLIEKDGGLYYIVAPTEIINAKQLILNESQTKLVCEIYKAMKYKNYDNLDSEKIIDLYRLLINKMELYYPEYRKQLVKKFEDRYEQLKVISIEEKCNIIKQILATLHCNSSIGKIMYSDFKISTTIGRLNGRTISLDDISFIAESPTGMYSKKYKL

SEQ ID NO: 333 - protein, 1288 aa, Enterococcus faecalis
MRLFEEGHTAEDRRLKRTARRRISRRRNRLRYLQAFFEEAMTDLDENFFARLQESFLVPEDKKWHRHPIFAKLEDEVAYHETYPTIYHLRKKLADSSEQADLRLIYLALAHIVKYRGHFLIEGKLSTENTSVKDQFQQFMVIYNQTFVNGESRLVSAPLPESVLIEEELTEKASRTKKSEKVLQQFPQEKANGLFGQFLKLMVGNKADFKKVFGLEEEAKITYASESYEEDLEGILAKVGDEYSDVFLAAKNVYDAVELSTILADSDKKSHAKLSSSMIVRFTEHQEDLKKFKRFIRENCPDEYDNLFKNEQKDGYAGYIAHAGKVSQLKFYQYVKKIIQDIAGAEYFLEKIAQENFLRKQRTFDNGVIPHQIHLAELQAIIHRQAAYYPFLKENQEKIEQLVTFRIPYYVGPLSKGDASTFAWLKRQSEEPIRPWNLQETVDLDQSATAFIERMTNFDTYLPSEKVLPKHSLLYEKFMVFNELTKISYTDDRGIKANFSGKEKEKIFDYLFKTRRKVKKKDIIQFYRNEYNTEIVTLSGLEEDQFNASFSTYQDLLKCGLTRAELDHPDNAEKLEDIIKILTIFEDRQRIRTQLSTFKGQFSAEVLKKLERKHYTGWGRLSKKLINGIYDKESGKTILDYLVKDDGVSKHYNRNFMQLINDSQLSFKNAIQKAQSSEHEETLSETVNELAGSPAIKKGIYQSLKIVDELVAIMGYAPKRIVVEMARENQTTSTGKRRSIQRLKIVEKAMAEIGSNLLKEQPTTNEQLRDTRLFLYYMQNGKDMYTGDELSLHRLSHYDIDHIIPQSFMKDDSLDNLVLVGSTENRGKSDDVPSKEVVKDMKAYWEKLYAAGLISQRKFQRLTKGEQGGLTLEDKAHFIQRQLVETRQITKNVAGILDQRYNAKSKEKKVQIITLKASLTSQFRSIFGLYKVREVNDYHHGQDAYLNCVVATTLLKVYPNLAPEFVYGEYPKFQTFKENKATAKAIIYTNLLRFFTEDEPRFTKDGEILWSNSYLKTIKKELNYHQMNIVKKVEVQKGGFSKESIKPKGPSNKLIPVKNGLDPQKYGGFDSPVVAYTVLFTHEKGKKPLIKQEILGITIMEKTRFEQNPILFLEEKGFLRPRVLMKLPKYTLYEFPEGRRRLLASAKEAQKGNQMVLPEHLLTLLYHAKQCLLPNQSESLAYVEQHQPEFQEILERVVDFAEVHTLAKSKVQQIVKLFEANQTADVKEIAASFIQLMQFNAMGAPSTFKFFQKDIERARYTSIKEIFDATIIYQSPTGLYETRRKVVD

SEQ ID NO: 334 - protein, 1052 aa, Staphylococcus aureus; identical to SEQ ID NO: 8

SEQ ID NO: 335 - protein, 1082 aa, Geobacillus thermodenitrificans
MKYKIGLDIGITSIGWAVINLDIPRIEDLGVRIFDRAENPKTGESLALPRRLARSARRRLRRRKHRLERIRRLFVREGILTKEELNKLFEKKHEIDVWQLRVEALDRKLNNDELARILLHLAKRRGFRSNRKSERTNKENSTMLKHIEENQSILSSYRTVAEMVVKDPKFSLHKRNKEDNYTNTVARDDLEREIKLIFAKQREYGNIVCTEAFEHEYISIWASQRPFASKDDIEKKVGFCTFEPKEKRAPKATYTFQSFTVWEHINKLRLVSPGGIRALTDDERRLIYKQAFHKNKITFHDVRTLLNLPDDTRFKGLLYDRNTTLKENEKVRFLELGAYHKIRKAIDSVYGKGAAKSFRPIDFDTFGYALTMFKDDTDIRSYLRNEYEQNGKRMENLADKVYDEELIEELLNLSFSKFGHLSLKALRNILPYMEQGEVYSTACERAGYTFTGPKKKQKTVLLPNIPPIANPVVMRALTQARKVVNAIIKKYGSPVSIHIELARELSQSFDERRKMQKEQEGNRKKNETAIRQLVEYGLTLNPTGLDIVKFKLWSEQNGKCAYSLQPIEIERLLEPGYTEVDHVIPYSRSLDDSYTNKVLVLTKENREKGNRTPAEYLGLGSERWQQFETFVLTNKQFSKKKRDRLLRLHYDENEENEFKNRNLNDTRYISRFLANFIREHLKFADSDDKQKVYTVNGRITAHLRSRWNFNKNREESNLHHAVDAAIVACTTPSDIARVTAFYQRREQNKELSKKTDPQFPQPWPHFADELQARLSKNPKESIKALNLGNYDNEKLESLQPVFVSRMPKRSITGAAHQETLRRYIGIDERSGKIQTVVKKKLSEIQLDKTGHFPMYGKESDPRTYEAIRQRLLEHNNDPKKAFQEPLYKPKKNGELGPIIRTIKIIDTTNQVIPLNDGKTVAYNSNIVRVDVFEKDGKYYCVPIYTIDMMKGILPNKAIEPNKPYSEWKEMTEDYTFRFSLYPNDLIRIEFPREKTIKTAVGEEIKIKDLFAYYQTIDSSNGGLSLVSHDNNFSLRSIGSRTLKRFEKYQVDVLGNIYKVRGEKRVGVASSSHSKAGETIRPL

SEQ ID NO: 336 - protein, 1375 aa, S. canis
MEKKYSIGLDIGTNSVGWAVITDDYKVPSKKFKVLGNTNRKSIKKNLMGALLFDSGETAEATRLKRTARRRYTRRKNRIRYLQEIFANEMAKLDDSFFQRLEESFLVEEDKKNERHPIFGNLADEVAYHRNYPTIYHLRKKLADSPEKADLRLIYLALAHIIKFRGHFLIEGKLNAENSDVAKLFYQLIQTYNQLFEESPLDEIEVDAKGILSARLSKSKRLEKLIAVFPNEKKNGLFGNIIALALGLTPNFKSNFDLTEDAKLQLSKDTYDDDLDELLGQIGDQYADLFSAAKNLSDAILLSDILRSNSEVTKAPLSASMVKRYDEHHQDLALLKTLVRQQFPEKYAEIFKDDTKNGYAGYVGIGIKHRKRTTKLATQEEFYKFIKPILEKMDGAEELLAKLNRDDLLRKQRTFDNGSIPHQIHLKELHAILRRQEEFYPFLKENREKIEKILTFRIPYYVGPLARGNSRFAWLTRKSEEAITPWNFEEVVDKGASAQSFIERMTNFDEQLPNKKVLPKHSLLYEYFTVYNELTKVKYVTERMRKPEFLSGEQKKAIVDLLFKTNRKVTVKQLKEDYFKKIECFDSVEIIGVEDRFNASLGTYHDLLKIIKDKDFLDNEENEDILEDIVLTLTLFEDREMIEERLKTYAHLFDDKVMKQLKRRHYTGWGRLSRKMINGIRDKQSGKTILDFLKSDGFSNRNFMQLIHDDSLTFKEEIEKAQVSGQGDSLHEQIADLAGSPAIKKGILQTVKIVDELVKVMGHKPENIVIEMARENQTTTKGLQQSRERKKRIEEGIKELESQILKENPVENTQLQNEKLYLYYLQNGRDMYVDQELDINRLSDYDVDHIVPQSFIKDDSIDNKVLTRSVENRGKSDNVPSEEVVKKMKNYWRQLLNAKLITQRKFDNLTKAERGGLSEADKAGFIKRQLVETRQITKHVARILDSRMNTKRDKNDKPIREVKVITLKSKLVSDFRKDFQLYKVRDINNYHHAHDAYLNAVVGTALIKKYPKLESEFVYGDYKVYDVRKMIAKSEQEIGKATAKRFFYSNIMNFFKTEVKLANGEIRKRPLIETNGETGEVVWNKEKDFATVRKVLAMPQVNIVKKTEVQTGGFSKESILSKRESAKLIPRKKGWDTRKYGGFGSPTVAYSILVVAKVEKGKAKKLKSVKVLVGITIMEKGSYEKDPIGFLEAKGYKDIKKELIFKLPKYSLFELENGRRRMLASATELQKANELVLPQHLVRLLYYTQNISATTGSNNLGYIEQHREEFKEIFEKIIDFSEKYILKNKVNSNLKSSFDEQFAVSDSILLSNSFVSLLKYTSFGASGGFTFLDLDVKQGRLRYQTVTEVLDATLIYQSITGLYETRTDLSQLGGD

SEQ ID NO: 337 - protein, 1368 aa, Streptococcus pyogenes
  SITE (10)..(10): Xaa can be any naturally occurring amino acid
  SITE (840)..(840): Xaa can be any naturally occurring amino acid
MDKKYSIGLXIGTNSVGWAVITDEYKVPSKKFKVLGNTDRHSIKKNLIGALLFDSGETAEATRLKRTARRRYTRRKNRICYLQEIFSNEMAKVDDSFFHRLEESFLVEEDKKHERHPIFGNIVDEVAYHEKYPTIYHLRKKLVDSTDKADLRLIYLALAHMIKFRGHFLIEGDLNPDNSDVDKLFIQLVQTYNQLFEENPINASGVDAKAILSARLSKSRRLENLIAQLPGEKKNGLFGNLIALSLGLTPNFKSNFDLAEDAKLQLSKDTYDDDLDNLLAQIGDQYADLFLAAKNLSDAILLSDILRVNTEITKAPLSASMIKRYDEHHQDLTLLKALVRQQLPEKYKEIFFDQSKNGYAGYIDGGASQEEFYKFIKPILEKMDGTEELLVKLNREDLLRKQRTFDNGSIPHQIHLGELHAILRRQEDFYPFLKDNREKIEKILTFRIPYYVGPLARGNSRFAWMTRKSEETITPWNFEEVVDKGASAQSFIERMTNFDKNLPNEKVLPKHSLLYEYFTVYNELTKVKYVTEGMRKPAFLSGEQKKAIVDLLFKTNRKVTVKQLKEDYFKKIECFDSVEISGVEDRFNASLGTYHDLLKIIKDKDFLDNEENEDILEDIVLTLTLFEDREMIEERLKTYAHLFDDKVMKQLKRRRYTGWGRLSRKLINGIRDKQSGKTILDFLKSDGFANRNFMQLIHDDSLTFKEDIQKAQVSGQGDSLHEHIANLAGSPAIKKGILQTVKVVDELVKVMGRHKPENIVIEMARENQTTQKGQKNSRERMKRIEEGIKELGSQILKEHPVENTQLQNEKLYLYYLQNGRDMYVDQELDINRLSDYDVDXIVPQSFLKDDSIDNKVLTRSDKNRGKSDNVPSEEVVKKMKNYWRQLLNAKLITQRKFDNLTKAERGGLSELDKAGFIKRQLVETRQITKHVAQILDSRMNTKYDENDKLIREVKVITLKSKLVSDFRKDFQFYKVREINNYHHAHDAYLNAVVGTALIKKYPKLESEFVYGDYKVYDVRKMIAKSEQEIGKATAKYFFYSNIMNFFKTEITLANGEIRKRPLIETNGETGEIVWDKGRDFATVRKVLSMPQVNIVKKTEVQTGGFSKESILPKRNSDKLIARKKDWDPKKYGGFDSPTVAYSVLVVAKVEKGKSKKLKSVKELLGITIMERSSFEKNPIDFLEAKGYKEVKKDLIIKLPKYSLFELENGRKRMLASAGELQKGNELALPSKYVNFLYLASHYEKLKGSPEDNEQKQLFVEQHKHYLDEIIEQISEFSKRVILADANLDKVLSAYNKHRDKPIREQAENIIHLFTLTNLGAPAAFKYFDTTIDRKRYTSTKEVLDATLIHQSITGLYETRIDLSQLGGD

SEQ ID NO: 338 - protein, 1368 aa, Streptococcus pyogenes
MDKKYSIGLAIGTNSVGWAVITDEYKVPSKKFKVLGNTDRHSIKKNLIGALLFDSGETAEATRLKRTARRRYTRRKNRICYLQEIFSNEMAKVDDSFFHRLEESFLVEEDKKHERHPIFGNIVDEVAYHEKYPTIYHLRKKLVDSTDKADLRLIYLALAHMIKFRGHFLIEGDLNPDNSDVDKLFIQLVQTYNQLFEENPINASGVDAKAILSARLSKSRRLENLIAQLPGEKKNGLFGNLIALSLGLTPNFKSNFDLAEDAKLQLSKDTYDDDLDNLLAQIGDQYADLFLAAKNLSDAILLSDILRVNTEITKAPLSASMIKRYDEHHQDLTLLKALVRQQLPEKYKEIFFDQSKNGYAGYIDGGASQEEFYKFIKPILEKMDGTEELLVKLNREDLLRKQRTFDNGSIPHQIHLGELHAILRRQEDFYPFLKDNREKIEKILTFRIPYYVGPLARGNSRFAWMTRKSEETITPWNFEEVVDKGASAQSFIERMTNFDKNLPNEKVLPKHSLLYEYFTVYNELTKVKYVTEGMRKPAFLSGEQKKAIVDLLFKTNRKVTVKQLKEDYFKKIECFDSVEISGVEDRFNASLGTYHDLLKIIKDKDFLDNEENEDILEDIVLTLTLFEDREMIEERLKTYAHLFDDKVMKQLKRRRYTGWGRLSRKLINGIRDKQSGKTILDFLKSDGFANRNFMQLIHDDSLTFKEDIQKAQVSGQGDSLHEHIANLAGSPAIKKGILQTVKVVDELVKVMGRHKPENIVIEMARENQTTQKGQKNSRERMKRIEEGIKELGSQILKEHPVENTQLQNEKLYLYYLQNGRDMYVDQELDINRLSDYDVDAIVPQSFLKDDSIDNKVLTRSDKNRGKSDNVPSEEVVKKMKNYWRQLLNAKLITQRKFDNLTKAERGGLSELDKAGFIKRQLVETRQITKHVAQILDSRMNTKYDENDKLIREVKVITLKSKLVSDFRKDFQFYKVREINNYHHAHDAYLNAVVGTALIKKYPKLESEFVYGDYKVYDVRKMIAKSEQEIGKATAKYFFYSNIMNFFKTEITLANGEIRKRPLIETNGETGEIVWDKGRDFATVRKVLSMPQVNIVKKTEVQTGGFSKESILPKRNSDKLIARKKDWDPKKYGGFDSPTVAYSVLVVAKVEKGKSKKLKSVKELLGITIMERSSFEKNPIDFLEAKGYKEVKKDLIIKLPKYSLFELENGRKRMLASAGELQKGNELALPSKYVNFLYLASHYEKLKGSPEDNEQKQLFVEQHKHYLDEIIEQISEFSKRVILADANLDKVLSAYNKHRDKPIREQAENIIHLFTLTNLGAPAAFKYFDTTIDRKRYTSTKEVLDATLIHQSITGLYETRIDLSQLGGD

SEQ ID NO: 339 - protein, 1368 aa, Streptococcus pyogenes
  SITE (10)..(10): Xaa can be any naturally occurring amino acid
MDKKYSIGLXIGTNSVGWAVITDEYKVPSKKFKVLGNTDRHSIKKNLIGALLFDSGETAEATRLKRTARRRYTRRKNRICYLQEIFSNEMAKVDDSFFHRLEESFLVEEDKKHERHPIFGNIVDEVAYHEKYPTIYHLRKKLVDSTDKADLRLIYLALAHMIKFRGHFLIEGDLNPDNSDVDKLFIQLVQTYNQLFEENPINASGVDAKAILSARLSKSRRLENLIAQLPGEKKNGLFGNLIALSLGLTPNFKSNFDLAEDAKLQLSKDTYDDDLDNLLAQIGDQYADLFLAAKNLSDAILLSDILRVNTEITKAPLSASMIKRYDEHHQDLTLLKALVRQQLPEKYKEIFFDQSKNGYAGYIDGGASQEEFYKFIKPILEKMDGTEELLVKLNREDLLRKQRTFDNGSIPHQIHLGELHAILRRQEDFYPFLKDNREKIEKILTFRIPYYVGPLARGNSRFAWMTRKSEETITPWNFEEVVDKGASAQSFIERMTNFDKNLPNEKVLPKHSLLYEYFTVYNELTKVKYVTEGMRKPAFLSGEQKKAIVDLLFKTNRKVTVKQLKEDYFKKIECFDSVEISGVEDRFNASLGTYHDLLKIIKDKDFLDNEENEDILEDIVLTLTLFEDREMIEERLKTYAHLFDDKVMKQLKRRRYTGWGRLSRKLINGIRDKQSGKTILDFLKSDGFANRNFMQLIHDDSLTFKEDIQKAQVSGQGDSLHEHIANLAGSPAIKKGILQTVKVVDELVKVMGRHKPENIVIEMARENQTTQKGQKNSRERMKRIEEGIKELGSQILKEHPVENTQLQNEKLYLYYLQNGRDMYVDQELDINRLSDYDVDHIVPQSFLKDDSIDNKVLTRSDKNRGKSDNVPSEEVVKKMKNYWRQLLNAKLITQRKFDNLTKAERGGLSELDKAGFIKRQLVETRQITKHVAQILDSRMNTKYDENDKLIREVKVITLKSKLVSDFRKDFQFYKVREINNYHHAHDAYLNAVVGTALIKKYPKLESEFVYGDYKVYDVRKMIAKSEQEIGKATAKYFFYSNIMNFFKTEITLANGEIRKRPLIETNGETGEIVWDKGRDFATVRKVLSMPQVNIVKKTEVQTGGFSKESILPKRNSDKLIARKKDWDPKKYGGFDSPTVAYSVLVVAKVEKGKSKKLKSVKELLGITIMERSSFEKNPIDFLEAKGYKEVKKDLIIKLPKYSLFELENGRKRMLASAGELQKGNELALPSKYVNFLYLASHYEKLKGSPEDNEQKQLFVEQHKHYLDEIIEQISEFSKRVILADANLDKVLSAYNKHRDKPIREQAENIIHLFTLTNLGAPAAFKYFDTTIDRKRYTSTKEVLDATLIHQSITGLYETRIDLSQLGGD

SEQ ID NO: 340 - protein, 1368 aa, Streptococcus pyogenes
  SITE (762)..(762): Xaa can be any naturally occurring amino acid
MDKKYSIGLDIGTNSVGWAVITDEYKVPSKKFKVLGNTDRHSIKKNLIGALLFDSGETAEATRLKRTARRRYTRRKNRICYLQEIFSNEMAKVDDSFFHRLEESFLVEEDKKHERHPIFGNIVDEVAYHEKYPTIYHLRKKLVDSTDKADLRLIYLALAHMIKFRGHFLIEGDLNPDNSDVDKLFIQLVQTYNQLFEENPINASGVDAKAILSARLSKSRRLENLIAQLPGEKKNGLFGNLIALSLGLTPNFKSNFDLAEDAKLQLSKDTYDDDLDNLLAQIGDQYADLFLAAKNLSDAILLSDILRVNTEITKAPLSASMIKRYDEHHQDLTLLKALVRQQLPEKYKEIFFDQSKNGYAGYIDGGASQEEFYKFIKPILEKMDGTEELLVKLNREDLLRKQRTFDNGSIPHQIHLGELHAILRRQEDFYPFLKDNREKIEKILTFRIPYYVGPLARGNSRFAWMTRKSEETITPWNFEEVVDKGASAQSFIERMTNFDKNLPNEKVLPKHSLLYEYFTVYNELTKVKYVTEGMRKPAFLSGEQKKAIVDLLFKTNRKVTVKQLKEDYFKKIECFDSVEISGVEDRFNASLGTYHDLLKIIKDKDFLDNEENEDILEDIVLTLTLFEDREMIEERLKTYAHLFDDKVMKQLKRRRYTGWGRLSRKLINGIRDKQSGKTILDFLKSDGFANRNFMQLIHDDSLTFKEDIQKAQVSGQGDSLHEHIANLAGSPAIKKGILQTVKVVDELVKVMGRHKPENIVIXMARENQTTQKGQKNSRERMKRIEEGIKELGSQILKEHPVENTQLQNEKLYLYYLQNGRDMYVDQELDINRLSDYDVDHIVPQSFLKDDSIDNKVLTRSDKNRGKSDNVPSEEVVKKMKNYWRQLLNAKLITQRKFDNLTKAERGGLSELDKAGFIKRQLVETRQITKHVAQILDSRMNTKYDENDKLIREVKVITLKSKLVSDFRKDFQFYKVREINNYHHAHDAYLNAVVGTALIKKYPKLESEFVYGDYKVYDVRKMIAKSEQEIGKATAKYFFYSNIMNFFKTEITLANGEIRKRPLIETNGETGEIVWDKGRDFATVRKVLSMPQVNIVKKTEVQTGGFSKESILPKRNSDKLIARKKDWDPKKYGGFDSPTVAYSVLVVAKVEKGKSKKLKSVKELLGITIMERSSFEKNPIDFLEAKGYKEVKKDLIIKLPKYSLFELENGRKRMLASAGELQKGNELALPSKYVNFLYLASHYEKLKGSPEDNEQKQLFVEQHKHYLDEIIEQISEFSKRVILADANLDKVLSAYNKHRDKPIREQAENIIHLFTLTNLGAPAAFKYFDTTIDRKRYTSTKEVLDATLIHQSITGLYETRIDLSQLGGD

SEQ ID NO: 341 - protein, 1368 aa, Streptococcus pyogenes
  SITE (983)..(983): Xaa can be any naturally occurring amino acid
MDKKYSIGLDIGTNSVGWAVITDEYKVPSKKFKVLGNTDRHSIKKNLIGALLFDSGETAEATRLKRTARRRYTRRKNRICYLQEIFSNEMAKVDDSFFHRLEESFLVEEDKKHERHPIFGNIVDEVAYHEKYPTIYHLRKKLVDSTDKADLRLIYLALAHMIKFRGHFLIEGDLNPDNSDVDKLFIQLVQTYNQLFEENPINASGVDAKAILSARLSKSRRLENLIAQLPGEKKNGLFGNLIALSLGLTPNFKSNFDLAEDAKLQLSKDTYDDDLDNLLAQIGDQYADLFLAAKNLSDAILLSDILRVNTEITKAPLSASMIKRYDEHHQDLTLLKALVRQQLPEKYKEIFFDQSKNGYAGYIDGGASQEEFYKFIKPILEKMDGTEELLVKLNREDLLRKQRTFDNGSIPHQIHLGELHAILRRQEDFYPFLKDNREKIEKILTFRIPYYVGPLARGNSRFAWMTRKSEETITPWNFEEVVDKGASAQSFIERMTNFDKNLPNEKVLPKHSLLYEYFTVYNELTKVKYVTEGMRKPAFLSGEQKKAIVDLLFKTNRKVTVKQLKEDYFKKIECFDSVEISGVEDRFNASLGTYHDLLKIIKDKDFLDNEENEDILEDIVLTLTLFEDREMIEERLKTYAHLFDDKVMKQLKRRRYTGWGRLSRKLINGIRDKQSGKTILDFLKSDGFANRNFMQLIHDDSLTFKEDIQKAQVSGQGDSLHEHIANLAGSPAIKKGILQTVKVVDELVKVMGRHKPENIVIEMARENQTTQKGQKNSRERMKRIEEGIKELGSQILKEHPVENTQLQNEKLYLYYLQNGRDMYVDQELDINRLSDYDVDHIVPQSFLKDDSIDNKVLTRSDKNRGKSDNVPSEEVVKKMKNYWRQLLNAKLITQRKFDNLTKAERGGLSELDKAGFIKRQLVETRQITKHVAQILDSRMNTKYDENDKLIREVKVITLKSKLVSDFRKDFQFYKVREINNYHXAHDAYLNAVVGTALIKKYPKLESEFVYGDYKVYDVRKMIAKSEQEIGKATAKYFFYSNIMNFFKTEITLANGEIRKRPLIETNGETGEIVWDKGRDFATVRKVLSMPQVNIVKKTEVQTGGFSKESILPKRNSDKLIARKKDWDPKKYGGFDSPTVAYSVLVVAKVEKGKSKKLKSVKELLGITIMERSSFEKNPIDFLEAKGYKEVKKDLIIKLPKYSLFELENGRKRMLASAGELQKGNELALPSKYVNFLYLASHYEKLKGSPEDNEQKQLFVEQHKHYLDEIIEQISEFSKRVILADANLDKVLSAYNKHRDKPIREQAENIIHLFTLTNLGAPAAFKYFDTTIDRKRYTSTKEVLDATLIHQSITGLYETRIDLSQLGGD

SEQ ID NO: 342 - protein, 1368 aa, Streptococcus pyogenes
  SITE (986)..(986): Xaa can be any naturally occurring amino acid
MDKKYSIGLDIGTNSVGWAVITDEYKVPSKKFKVLGNTDRHSIKKNLIGALLFDSGETAEATRLKRTARRRYTRRKNRICYLQEIFSNEMAKVDDSFFHRLEESFLVEEDKKHERHPIFGNIVDEVAYHEKYPTIYHLRKKLVDSTDKADLRLIYLALAHMIKFRGHFLIEGDLNPDNSDVDKLFIQLVQTYNQLFEENPINASGVDAKAILSARLSKSRRLENLIAQLPGEKKNGLFGNLIALSLGLTPNFKSNFDLAEDAKLQLSKDTYDDDLDNLLAQIGDQYADLFLAAKNLSDAILLSDILRVNTEITKAPLSASMIKRYDEHHQDLTLLKALVRQQLPEKYKEIFFDQSKNGYAGYIDGGASQEEFYKFIKPILEKMDGTEELLVKLNREDLLRKQRTFDNGSIPHQIHLGELHAILRRQEDFYPFLKDNREKIEKILTFRIPYYVGPLARGNSRFAWMTRKSEETITPWNFEEVVDKGASAQSFIERMTNFDKNLPNEKVLPKHSLLYEYFTVYNELTKVKYVTEGMRKPAFLSGEQKKAIVDLLFKTNRKVTVKQLKEDYFKKIECFDSVEISGVEDRFNASLGTYHDLLKIIKDKDFLDNEENEDILEDIVLTLTLFEDREMIEERLKTYAHLFDDKVMKQLKRRRYTGWGRLSRKLINGIRDKQSGKTILDFLKSDGFANRNFMQLIHDDSLTFKEDIQKAQVSGQGDSLHEHIANLAGSPAIKKGILQTVKVVDELVKVMGRHKPENIVIEMARENQTTQKGQKNSRERMKRIEEGIKELGSQILKEHPVENTQLQNEKLYLYYLQNGRDMYVDQELDINRLSDYDVDHIVPQSFLKDDSIDNKVLTRSDKNRGKSDNVPSEEVVKKMKNYWRQLLNAKLITQRKFDNLTKAERGGLSELDKAGFIKRQLVETRQITKHVAQILDSRMNTKYDENDKLIREVKVITLKSKLVSDFRKDFQFYKVREINNYHHAHXAYLNAVVGTALIKKYPKLESEFVYGDYKVYDVRKMIAKSEQEIGKATAKYFFYSNIMNFFKTEITLANGEIRKRPLIETNGETGEIVWDKGRDFATVRKVLSMPQVNIVKKTEVQTGGFSKESILPKRNSDKLIARKKDWDPKKYGGFDSPTVAYSVLVVAKVEKGKSKKLKSVKELLGITIMERSSFEKNPIDFLEAKGYKEVKKDLIIKLPKYSLFELENGRKRMLASAGELQKGNELALPSKYVNFLYLASHYEKLKGSPEDNEQKQLFVEQHKHYLDEIIEQISEFSKRVILADANLDKVLSAYNKHRDKPIREQAENIIHLFTLTNLGAPAAFKYFDTTIDRKRYTSTKEVLDATLIHQSITGLYETRIDLSQLGGD

SEQ ID NO: 343 - protein, 1368 aa, Streptococcus pyogenes
MDKKYSIGLAIGTNSVGWAVITDEYKVPSKKFKVLGNTDRHSIKKNLIGALLFDSGETAEATRLKRTARRRYTRRKNRICYLQEIFSNEMAKVDDSFFHRLEESFLVEEDKKHERHPIFGNIVDEVAYHEKYPTIYHLRKKLVDSTDKADLRLIYLALAHMIKFRGHFLIEGDLNPDNSDVDKLFIQLVQTYNQLFEENPINASGVDAKAILSARLSKSRRLENLIAQLPGEKKNGLFGNLIALSLGLTPNFKSNFDLAEDAKLQLSKDTYDDDLDNLLAQIGDQYADLFLAAKNLSDAILLSDILRVNTEITKAPLSASMIKRYDEHHQDLTLLKALVRQQLPEKYKEIFFDQSKNGYAGYIDGGASQEEFYKFIKPILEKMDGTEELLVKLNREDLLRKQRTFDNGSIPHQIHLGELHAILRRQEDFYPFLKDNREKIEKILTFRIPYYVGPLARGNSRFAWMTRKSEETITPWNFEEVVDKGASAQSFIERMTNFDKNLPNEKVLPKHSLLYEYFTVYNELTKVKYVTEGMRKPAFLSGEQKKAIVDLLFKTNRKVTVKQLKEDYFKKIECFDSVEISGVEDRFNASLGTYHDLLKIIKDKDFLDNEENEDILEDIVLTLTLFEDREMIEERLKTYAHLFDDKVMKQLKRRRYTGWGRLSRKLINGIRDKQSGKTILDFLKSDGFANRNFMQLIHDDSLTFKEDIQKAQVSGQGDSLHEHIANLAGSPAIKKGILQTVKVVDELVKVMGRHKPENIVIEMARENQTTQKGQKNSRERMKRIEEGIKELGSQILKEHPVENTQLQNEKLYLYYLQNGRDMYVDQELDINRLSDYDVDHIVPQSFLKDDSIDNKVLTRSDKNRGKSDNVPSEEVVKKMKNYWRQLLNAKLITQRKFDNLTKAERGGLSELDKAGFIKRQLVETRQITKHVAQILDSRMNTKYDENDKLIREVKVITLKSKLVSDFRKDFQFYKVREINNYHHAHDAYLNAVVGTALIKKYPKLESEFVYGDYKVYDVRKMIAKSEQEIGKATAKYFFYSNIMNFFKTEITLANGEIRKRPLIETNGETGEIVWDKGRDFATVRKVLSMPQVNIVKKTEVQTGGFSKESILPKRNSDKLIARKKDWDPKKYGGFDSPTVAYSVLVVAKVEKGKSKKLKSVKELLGITIMERSSFEKNPIDFLEAKGYKEVKKDLIIKLPKYSLFELENGRKRMLASAGELQKGNELALPSKYVNFLYLASHYEKLKGSPEDNEQKQLFVEQHKHYLDEIIEQISEFSKRVILADANLDKVLSAYNKHRDKPIREQAENIIHLFTLTNLGAPAAFKYFDTTIDRKRYTSTKEVLDATLIHQSITGLYETRIDLSQLGGD

SEQ ID NO: 344 - protein, 1368 aa, Streptococcus pyogenes
MDKKYSIGLDIGTNSVGWAVITDEYKVPSKKFKVLGNTDRHSIKKNLIGALLFDSGETAEATRLKRTARRRYTRRKNRICYLQEIFSNEMAKVDDSFFHRLEESFLVEEDKKHERHPIFGNIVDEVAYHEKYPTIYHLRKKLVDSTDKADLRLIYLALAHMIKFRGHFLIEGDLNPDNSDVDKLFIQLVQTYNQLFEENPINASGVDAKAILSARLSKSRRLENLIAQLPGEKKNGLFGNLIALSLGLTPNFKSNFDLAEDAKLQLSKDTYDDDLDNLLAQIGDQYADLFLAAKNLSDAILLSDILRVNTEITKAPLSASMIKRYDEHHQDLTLLKALVRQQLPEKYKEIFFDQSKNGYAGYIDGGASQEEFYKFIKPILEKMDGTEELLVKLNREDLLRKQRTFDNGSIPHQIHLGELHAILRRQEDFYPFLKDNREKIEKILTFRIPYYVGPLARGNSRFAWMTRKSEETITPWNFEEVVDKGASAQSFIERMTNFDKNLPNEKVLPKHSLLYEYFTVYNELTKVKYVTEGMRKPAFLSGEQKKAIVDLLFKTNRKVTVKQLKEDYFKKIECFDSVEISGVEDRFNASLGTYHDLLKIIKDKDFLDNEENEDILEDIVLTLTLFEDREMIEERLKTYAHLFDDKVMKQLKRRRYTGWGRLSRKLINGIRDKQSGKTILDFLKSDGFANRNFMQLIHDDSLTFKEDIQKAQVSGQGDSLHEHIANLAGSPAIKKGILQTVKVVDELVKVMGRHKPENIVIAMARENQTTQKGQKNSRERMKRIEEGIKELGSQILKEHPVENTQLQNEKLYLYYLQNGRDMYVDQELDINRLSDYDVDHIVPQSFLKDDSIDNKVLTRSDKNRGKSDNVPSEEVVKKMKNYWRQLLNAKLITQRKFDNLTKAERGGLSELDKAGFIKRQLVETRQITKHVAQILDSRMNTKYDENDKLIREVKVITLKSKLVSDFRKDFQFYKVREINNYHHAHDAYLNAVVGTALIKKYPKLESEFVYGDYKVYDVRKMIAKSEQEIGKATAKYFFYSNIMNFFKTEITLANGEIRKRPLIETNGETGEIVWDKGRDFATVRKVLSMPQVNIVKKTEVQTGGFSKESILPKRNSDKLIARKKDWDPKKYGGFDSPTVAYSVLVVAKVEKGKSKKLKSVKELLGITIMERSSFEKNPIDFLEAKGYKEVKKDLIIKLPKYSLFELENGRKRMLASAGELQKGNELALPSKYVNFLYLASHYEKLKGSPEDNEQKQLFVEQHKHYLDEIIEQISEFSKRVILADANLDKVLSAYNKHRDKPIREQAENIIHLFTLTNLGAPAAFKYFDTTIDRKRYTSTKEVLDATLIHQSITGLYETRIDLSQLGGD

SEQ ID NO: 345 - protein, 1368 aa, Streptococcus pyogenes
MDKKYSIGLDIGTNSVGWAVITDEYKVPSKKFKVLGNTDRHSIKKNLIGALLFDSGETAEATRLKRTARRRYTRRKNRICYLQEIFSNEMAKVDDSFFHRLEESFLVEEDKKHERHPIFGNIVDEVAYHEKYPTIYHLRKKLVDSTDKADLRLIYLALAHMIKFRGHFLIEGDLNPDNSDVDKLFIQLVQTYNQLFEENPINASGVDAKAILSARLSKSRRLENLIAQLPGEKKNGLFGNLIALSLGLTPNFKSNFDLAEDAKLQLSKDTYDDDLDNLLAQIGDQYADLFLAAKNLSDAILLSDILRVNTEITKAPLSASMIKRYDEHHQDLTLLKALVRQQLPEKYKEIFFDQSKNGYAGYIDGGASQEEFYKFIKPILEKMDGTEELLVKLNREDLLRKQRTFDNGSIPHQIHLGELHAILRRQEDFYPFLKDNREKIEKILTFRIPYYVGPLARGNSRFAWMTRKSEETITPWNFEEVVDKGASAQSFIERMTNFDKNLPNEKVLPKHSLLYEYFTVYNELTKVKYVTEGMRKPAFLSGEQKKAIVDLLFKTNRKVTVKQLKEDYFKKIECFDSVEISGVEDRFNASLGTYHDLLKIIKDKDFLDNEENEDILEDIVLTLTLFEDREMIEERLKTYAHLFDDKVMKQLKRRRYTGWGRLSRKLINGIRDKQSGKTILDFLKSDGFANRNFMQLIHDDSLTFKEDIQKAQVSGQGDSLHEHIANLAGSPAIKKGILQTVKVVDELVKVMGRHKPENIVIEMARENQTTQKGQKNSRERMKRIEEGIKELGSQILKEHPVENTQLQNEKLYLYYLQNGRDMYVDQELDINRLSDYDVDHIVPQSFLKDDSIDNKVLTRSDKNRGKSDNVPSEEVVKKMKNYWRQLLNAKLITQRKFDNLTKAERGGLSELDKAGFIKRQLVETRQITKHVAQILDSRMNTKYDENDKLIREVKVITLKSKLVSDFRKDFQFYKVREINNYHAAHDAYLNAVVGTALIKKYPKLESEFVYGDYKVYDVRKMIAKSEQEIGKATAKYFFYSNIMNFFKTEITLANGEIRKRPLIETNGETGEIVWDKGRDFATVRKVLSMPQVNIVKKTEVQTGGFSKESILPKRNSDKLIARKKDWDPKKYGGFDSPTVAYSVLVVAKVEKGKSKKLKSVKELLGITIMERSSFEKNPIDFLEAKGYKEVKKDLIIKLPKYSLFELENGRKRMLASAGELQKGNELALPSKYVNFLYLASHYEKLKGSPEDNEQKQLFVEQHKHYLDEIIEQISEFSKRVILADANLDKVLSAYNKHRDKPIREQAENIIHLFTLTNLGAPAAFKYFDTTIDRKRYTSTKEVLDATLIHQSITGLYETRIDLSQLGGD

SEQ ID NO: 346 - protein, 1368 aa, Streptococcus pyogenes
MDKKYSIGLDIGTNSVGWAVITDEYKVPSKKFKVLGNTDRHSIKKNLIGALLFDSGETAEATRLKRTARRRYTRRKNRICYLQEIFSNEMAKVDDSFFHRLEESFLVEEDKKHERHPIFGNIVDEVAYHEKYPTIYHLRKKLVDSTDKADLRLIYLALAHMIKFRGHFLIEGDLNPDNSDVDKLFIQLVQTYNQLFEENPINASGVDAKAILSARLSKSRRLENLIAQLPGEKKNGLFGNLIALSLGLTPNFKSNFDLAEDAKLQLSKDTYDDDLDNLLAQIGDQYADLFLAAKNLSDAILLSDILRVNTEITKAPLSASMIKRYDEHHQDLTLLKALVRQQLPEKYKEIFFDQSKNGYAGYIDGGASQEEFYKFIKPILEKMDGTEELLVKLNREDLLRKQRTFDNGSIPHQIHLGELHAILRRQEDFYPFLKDNREKIEKILTFRIPYYVGPLARGNSRFAWMTRKSEETITPWNFEEVVDKGASAQSFIERMTNFDKNLPNEKVLPKHSLLYEYFTVYNELTKVKYVTEGMRKPAFLSGEQKKAIVDLLFKTNRKVTVKQLKEDYFKKIECFDSVEISGVEDRFNASLGTYHDLLKIIKDKDFLDNEENEDILEDIVLTLTLFEDREMIEERLKTYAHLFDDKVMKQLKRRRYTGWGRLSRKLINGIRDKQSGKTILDFLKSDGFANRNFMQLIHDDSLTFKEDIQKAQVSGQGDSLHEHIANLAGSPAIKKGILQTVKVVDELVKVMGRHKPENIVIEMARENQTTQKGQKNSRERMKRIEEGIKELGSQILKEHPVENTQLQNEKLYLYYLQNGRDMYVDQELDINRLSDYDVDHIVPQSFLKDDSIDNKVLTRSDKNRGKSDNVPSEEVVKKMKNYWRQLLNAKLITQRKFDNLTKAERGGLSELDKAGFIKRQLVETRQITKHVAQILDSRMNTKYDENDKLIREVKVITLKSKLVSDFRKDFQFYKVREINNYHHAHAAYLNAVVGTALIKKYPKLESEFVYGDYKVYDVRKMIAKSEQEIGKATAKYFFYSNIMNFFKTEITLANGEIRKRPLIETNGETGEIVWDKGRDFATVRKVLSMPQVNIVKKTEVQTGGFSKESILPKRNSDKLIARKKDWDPKKYGGFDSPTVAYSVLVVAKVEKGKSKKLKSVKELLGITIMERSSFEKNPIDFLEAKGYKEVKKDLIIKLPKYSLFELENGRKRMLASAGELQKGNELALPSKYVNFLYLASHYEKLKGSPEDNEQKQLFVEQHKHYLDEIIEQISEFSKRVILADANLDKVLSAYNKHRDKPIREQAENIIHLFTLTNLGAPAAFKYFDTTIDRKRYTSTKEVLDATLIHQSITGLYETRIDLSQLGGD

SEQ ID NO: 347 - protein, 1368 aa, Streptococcus pyogenes
  SITE (840)..(840): Xaa can be any naturally occurring amino acid
MDKKYSIGLDIGTNSVGWAVITDEYKVPSKKFKVLGNTDRHSIKKNLIGALLFDSGETAEATRLKRTARRRYTRRKNRICYLQEIFSNEMAKVDDSFFHRLEESFLVEEDKKHERHPIFGNIVDEVAYHEKYPTIYHLRKKLVDSTDKADLRLIYLALAHMIKFRGHFLIEGDLNPDNSDVDKLFIQLVQTYNQLFEENPINASGVDAKAILSARLSKSRRLENLIAQLPGEKKNGLFGNLIALSLGLTPNFKSNFDLAEDAKLQLSKDTYDDDLDNLLAQIGDQYADLFLAAKNLSDAILLSDILRVNTEITKAPLSASMIKRYDEHHQDLTLLKALVRQQLPEKYKEIFFDQSKNGYAGYIDGGASQEEFYKFIKPILEKMDGTEELLVKLNREDLLRKQRTFDNGSIPHQIHLGELHAILRRQEDFYPFLKDNREKIEKILTFRIPYYVGPLARGNSRFAWMTRKSEETITPWNFEEVVDKGASAQSFIERMTNFDKNLPNEKVLPKHSLLYEYFTVYNELTKVKYVTEGMRKPAFLSGEQKKAIVDLLFKTNRKVTVKQLKEDYFKKIECFDSVEISGVEDRFNASLGTYHDLLKIIKDKDFLDNEENEDILEDIVLTLTLFEDREMIEERLKTYAHLFDDKVMKQLKRRRYTGWGRLSRKLINGIRDKQSGKTILDFLKSDGFANRNFMQLIHDDSLTFKEDIQKAQVSGQGDSLHEHIANLAGSPAIKKGILQTVKVVDELVKVMGRHKPENIVIEMARENQTTQKGQKNSRERMKRIEEGIKELGSQILKEHPVENTQLQNEKLYLYYLQNGRDMYVDQELDINRLSDYDVDXIVPQSFLKDDSIDNKVLTRSDKNRGKSDNVPSEEVVKKMKNYWRQLLNAKLITQRKFDNLTKAERGGLSELDKAGFIKRQLVETRQITKHVAQILDSRMNTKYDENDKLIREVKVITLKSKLVSDFRKDFQFYKVREINNYHHAHDAYLNAVVGTALIKKYPKLESEFVYGDYKVYDVRKMIAKSEQEIGKATAKYFFYSNIMNFFKTEITLANGEIRKRPLIETNGETGEIVWDKGRDFATVRKVLSMPQVNIVKKTEVQTGGFSKESILPKRNSDKLIARKKDWDPKKYGGFDSPTVAYSVLVVAKVEKGKSKKLKSVKELLGITIMERSSFEKNPIDFLEAKGYKEVKKDLIIKLPKYSLFELENGRKRMLASAGELQKGNELALPSKYVNFLYLASHYEKLKGSPEDNEQKQLFVEQHKHYLDEIIEQISEFSKRVILADANLDKVLSAYNKHRDKPIREQAENIIHLFTLTNLGAPAAFKYFDTTIDRKRYTSTKEVLDATLIHQSITGLYETRIDLSQLGGD

SEQ ID NO: 348 - protein, 1368 aa, Streptococcus pyogenes
MDKKYSIGLDIGTNSVGWAVITDEYKVPSKKFKVLGNTDRHSIKKNLIGALLFDSGETAEATRLKRTARRRYTRRKNRICYLQEIFSNEMAKVDDSFFHRLEESFLVEEDKKHERHPIFGNIVDEVAYHEKYPTIYHLRKKLVDSTDKADLRLIYLALAHMIKFRGHFLIEGDLNPDNSDVDKLFIQLVQTYNQLFEENPINASGVDAKAILSARLSKSRRLENLIAQLPGEKKNGLFGNLIALSLGLTPNFKSNFDLAEDAKLQLSKDTYDDDLDNLLAQIGDQYADLFLAAKNLSDAILLSDILRVNTEITKAPLSASMIKRYDEHHQDLTLLKALVRQQLPEKYKEIFFDQSKNGYAGYIDGGASQEEFYKFIKPILEKMDGTEELLVKLNREDLLRKQRTFDNGSIPHQIHLGELHAILRRQEDFYPFLKDNREKIEKILTFRIPYYVGPLARGNSRFAWMTRKSEETITPWNFEEVVDKGASAQSFIERMTNFDKNLPNEKVLPKHSLLYEYFTVYNELTKVKYVTEGMRKPAFLSGEQKKAIVDLLFKTNRKVTVKQLKEDYFKKIECFDSVEISGVEDRFNASLGTYHDLLKIIKDKDFLDNEENEDILEDIVLTLTLFEDREMIEERLKTYAHLFDDKVMKQLKRRRYTGWGRLSRKLINGIRDKQSGKTILDFLKSDGFANRNFMQLIHDDSLTFKEDIQKAQVSGQGDSLHEHIANLAGSPAIKKGILQTVKVVDELVKVMGRHKPENIVIEMARENQTTQKGQKNSRERMKRIEEGIKELGSQILKEHPVENTQLQNEKLYLYYLQNGRDMYVDQELDINRLSDYDVDAIVPQSFLKDDSIDNKVLTRSDKNRGKSDNVPSEEVVKKMKNYWRQLLNAKLITQRKFDNLTKAERGGLSELDKAGFIKRQLVETRQITKHVAQILDSRMNTKYDENDKLIREVKVITLKSKLVSDFRKDFQFYKVREINNYHHAHDAYLNAVVGTALIKKYPKLESEFVYGDYKVYDVRKMIAKSEQEIGKATAKYFFYSNIMNFFKTEITLANGEIRKRPLIETNGETGEIVWDKGRDFATVRKVLSMPQVNIVKKTEVQTGGFSKESILPKRNSDKLIARKKDWDPKKYGGFDSPTVAYSVLVVAKVEKGKSKKLKSVKELLGITIMERSSFEKNPIDFLEAKGYKEVKKDLIIKLPKYSLFELENGRKRMLASAGELQKGNELALPSKYVNFLYLASHYEKLKGSPEDNEQKQLFVEQHKHYLDEIIEQISEFSKRVILADANLDKVLSAYNKHRDKPIREQAENIIHLFTLTNLGAPAAFKYFDTTIDRKRYTSTKEVLDATLIHQSITGLYETRIDLSQLGGD

SEQ ID NO: 349 - protein, 1368 aa, Streptococcus pyogenes
  SITE (864)..(864): Xaa can be any naturally occurring amino acid
MDKKYSIGLDIGTNSVGWAVITDEYKVPSKKFKVLGNTDRHSIKKNLIGALLFDSGETAEATRLKRTARRRYTRRKNRICYLQEIFSNEMAKVDDSFFHRLEESFLVEEDKKHERHPIFGNIVDEVAYHEKYPTIYHLRKKLVDSTDKADLRLIYLALAHMIKFRGHFLIEGDLNPDNSDVDKLFIQLVQTYNQLFEENPINASGVDAKAILSARLSKSRRLENLIAQLPGEKKNGLFGNLIALSLGLTPNFKSNFDLAEDAKLQLSKDTYDDDLDNLLAQIGDQYADLFLAAKNLSDAILLSDILRVNTEITKAPLSASMIKRYDEHHQDLTLLKALVRQQLPEKYKEIFFDQSKNGYAGYIDGGASQEEFYKFIKPILEKMDGTEELLVKLNREDLLRKQRTFDNGSIPHQIHLGELHAILRRQEDFYPFLKDNREKIEKILTFRIPYYVGPLARGNSRFAWMTRKSEETITPWNFEEVVDKGASAQSFIERMTNFDKNLPNEKVLPKHSLLYEYFTVYNELTKVKYVTEGMRKPAFLSGEQKKAIVDLLFKTNRKVTVKQLKEDYFKKIECFDSVEISGVEDRFNASLGTYHDLLKIIKDKDFLDNEENEDILEDIVLTLTLFEDREMIEERLKTYAHLFDDKVMKQLKRRRYTGWGRLSRKLINGIRDKQSGKTILDFLKSDGFANRNFMQLIHDDSLTFKEDIQKAQVSGQGDSLHEHIANLAGSPAIKKGILQTVKVVDELVKVMGRHKPENIVIEMARENQTTQKGQKNSRERMKRIEEGIKELGSQILKEHPVENTQLQNEKLYLYYLQNGRDMYVDQELDINRLSDYDVDHIVPQSFLKDDSIDNKVLTRSDKNXGKSDNVPSEEVVKKMKNYWRQLLNAKLITQRKFDNLTKAERGGLSELDKAGFIKRQLVETRQITKHVAQILDSRMNTKYDENDKLIREVKVITLKSKLVSDFRKDFQFYKVREINNYHHAHDAYLNAVVGTALIKKYPKLESEFVYGDYKVYDVRKMIAKSEQEIGKATAKYFFYSNIMNFFKTEITLANGEIRKRPLIETNGETGEIVWDKGRDFATVRKVLSMPQVNIVKKTEVQTGGFSKESILPKRNSDKLIARKKDWDPKKYGGFDSPTVAYSVLVVAKVEKGKSKKLKSVKELLGITIMERSSFEKNPIDFLEAKGYKEVKKDLIIKLPKYSLFELENGRKRMLASAGELQKGNELALPSKYVNFLYLASHYEKLKGSPEDNEQKQLFVEQHKHYLDEIIEQISEFSKRVILADANLDKVLSAYNKHRDKPIREQAENIIHLFTLTNLGAPAAFKYFDTTIDRKRYTSTKEVLDATLIHQSITGLYETRIDLSQLGGD

SEQ ID NO: 350 - protein, 1368 aa, Streptococcus pyogenes
MDKKYSIGLDIGTNSVGWAVITDEYKVPSKKFKVLGNTDRHSIKKNLIGALLFDSGETAEATRLKRTARRRYTRRKNRICYLQEIFSNEMAKVDDSFFHRLEESFLVEEDKKHERHPIFGNIVDEVAYHEKYPTIYHLRKKLVDSTDKADLRLIYLALAHMIKFRGHFLIEGDLNPDNSDVDKLFIQLVQTYNQLFEENPINASGVDAKAILSARLSKSRRLENLIAQLPGEKKNGLFGNLIALSLGLTPNFKSNFDLAEDAKLQLSKDTYDDDLDNLLAQIGDQYADLFLAAKNLSDAILLSDILRVNTEITKAPLSASMIKRYDEHHQDLTLLKALVRQQLPEKYKEIFFDQSKNGYAGYIDGGASQEEFYKFIKPILEKMDGTEELLVKLNREDLLRKQRTFDNGSIPHQIHLGELHAILRRQEDFYPFLKDNREKIEKILTFRIPYYVGPLARGNSRFAWMTRKSEETITPWNFEEVVDKGASAQSFIERMTNFDKNLPNEKVLPKHSLLYEYFTVYNELTKVKYVTEGMRKPAFLSGEQKKAIVDLLFKTNRKVTVKQLKEDYFKKIECFDSVEISGVEDRFNASLGTYHDLLKIIKDKDFLDNEENEDILEDIVLTLTLFEDREMIEERLKTYAHLFDDKVMKQLKRRRYTGWGRLSRKLINGIRDKQSGKTILDFLKSDGFANRNFMQLIHDDSLTFKEDIQKAQVSGQGDSLHEHIANLAGSPAIKKGILQTVKVVDELVKVMGRHKPENIVIEMARENQTTQKGQKNSRERMKRIEEGIKELGSQILKEHPVENTQLQNEKLYLYYLQNGRDMYVDQELDINRLSDYDVDHIVPQSFLKDDSIDNKVLTRSDKNAGKSDNVPSEEVVKKMKNYWRQLLNAKLITQRKFDNLTKAERGGLSELDKAGFIKRQLVETRQITKHVAQILDSRMNTKYDENDKLIREVKVITLKSKLVSDFRKDFQFYKVREINNYHHAHDAYLNAVVGTALIKKYPKLESEFVYGDYKVYDVRKMIAKSEQEIGKATAKYFFYSNIMNFFKTEITLANGEIRKRPLIETNGETGEIVWDKGRDFATVRKVLSMPQVNIVKKTEVQTGGFSKESILPKRNSDKLIARKKDWDPKKYGGFDSPTVAYSVLVVAKVEKGKSKKLKSVKELLGITIMERSSFEKNPIDFLEAKGYKEVKKDLIIKLPKYSLFELENGRKRMLASAGELQKGNELALPSKYVNFLYLASHYEKLKGSPEDNEQKQLFVEQHKHYLDEIIEQISEFSKRVILADANLDKVLSAYNKHRDKPIREQAENIIHLFTLTNLGAPAAFKYFDTTIDRKRYTSTKEVLDATLIHQSITGLYETRIDLSQLGGD

SEQ ID NO: 351 - protein, 1367 aa, Streptococcus pyogenes
  SITE (839)..(839): Xaa can be any naturally occurring amino acid
DKKYSIGLDIGTNSVGWAVITDEYKVPSKKFKVLGNTDRHSIKKNLIGALLFDSGETAEATRLKRTARRRYTRRKNRICYLQEIFSNEMAKVDDSFFHRLEESFLVEEDKKHERHPIFGNIVDEVAYHEKYPTIYHLRKKLVDSTDKADLRLIYLALAHMIKFRGHFLIEGDLNPDNSDVDKLFIQLVQTYNQLFEENPINASGVDAKAILSARLSKSRRLENLIAQLPGEKKNGLFGNLIALSLGLTPNFKSNFDLAEDAKLQLSKDTYDDDLDNLLAQIGDQYADLFLAAKNLSDAILLSDILRVNTEITKAPLSASMIKRYDEHHQDLTLLKALVRQQLPEKYKEIFFDQSKNGYAGYIDGGASQEEFYKFIKPILEKMDGTEELLVKLNREDLLRKQRTFDNGSIPHQIHLGELHAILRRQEDFYPFLKDNREKIEKILTFRIPYYVGPLARGNSRFAWMTRKSEETITPWNFEEVVDKGASAQSFIERMTNFDKNLPNEKVLPKHSLLYEYFTVYNELTKVKYVTEGMRKPAFLSGEQKKAIVDLLFKTNRKVTVKQLKEDYFKKIECFDSVEISGVEDRFNASLGTYHDLLKIIKDKDFLDNEENEDILEDIVLTLTLFEDREMIEERLKTYAHLFDDKVMKQLKRRRYTGWGRLSRKLINGIRDKQSGKTILDFLKSDGFANRNFMQLIHDDSLTFKEDIQKAQVSGQGDSLHEHIANLAGSPAIKKGILQTVKVVDELVKVMGRHKPENIVIEMARENQTTQKGQKNSRERMKRIEEGIKELGSQILKEHPVENTQLQNEKLYLYYLQNGRDMYVDQELDINRLSDYDVDXIVPQSFLKDDSIDNKVLTRSDKNRGKSDNVPSEEVVKKMKNYWRQLLNAKLITQRKFDNLTKAERGGLSELDKAGFIKRQLVETRQITKHVAQILDSRMNTKYDENDKLIREVKVITLKSKLVSDFRKDFQFYKVREINNYHHAHDAYLNAVVGTALIKKYPKLESEFVYGDYKVYDVRKMIAKSEQEIGKATAKYFFYSNIMNFFKTEITLANGEIRKRPLIETNGETGEIVWDKGRDFATVRKVLSMPQVNIVKKTEVQTGGFSKESILPKRNSDKLIARKKDWDPKKYGGFDSPTVAYSVLVVAKVEKGKSKKLKSVKELLGITIMERSSFEKNPIDFLEAKGYKEVKKDLIIKLPKYSLFELENGRKRMLASAGELQKGNELALPSKYVNFLYLASHYEKLKGSPEDNEQKQLFVEQHKHYLDEIIEQISEFSKRVILADANLDKVLSAYNKHRDKPIREQAENIIHLFTLTNLGAPAAFKYFDTTIDRKRYTSTKEVLDATLIHQSITGLYETRIDLSQLGGD

SEQ ID NO: 352 - protein, 1367 aa, Streptococcus pyogenes
DKKYSIGLDIGTNSVGWAVITDEYKVPSKKFKVLGNTDRHSIKKNLIGALLFDSGETAEATRLKRTARRRYTRRKNRICYLQEIFSNEMAKVDDSFFHRLEESFLVEEDKKHERHPIFGNIVDEVAYHEKYPTIYHLRKKLVDSTDKADLRLIYLALAHMIKFRGHFLIEGDLNPDNSDVDKLFIQLVQTYNQLFEENPINASGVDAKAILSARLSKSRRLENLIAQLPGEKKNGLFGNLIALSLGLTPNFKSNFDLAEDAKLQLSKDTYDDDLDNLLAQIGDQYADLFLAAKNLSDAILLSDILRVNTEITKAPLSASMIKRYDEHHQDLTLLKALVRQQLPEKYKEIFFDQSKNGYAGYIDGGASQEEFYKFIKPILEKMDGTEELLVKLNREDLLRKQRTFDNGSIPHQIHLGELHAILRRQEDFYPFLKDNREKIEKILTFRIPYYVGPLARGNSRFAWMTRKSEETITPWNFEEVVDKGASAQSFIERMTNFDKNLPNEKVLPKHSLLYEYFTVYNELTKVKYVTEGMRKPAFLSGEQKKAIVDLLFKTNRKVTVKQLKEDYFKKIECFDSVEISGVEDRFNASLGTYHDLLKIIKDKDFLDNEENEDILEDIVLTLTLFEDREMIEERLKTYAHLFDDKVMKQLKRRRYTGWGRLSRKLINGIRDKQSGKTILDFLKSDGFANRNFMQLIHDDSLTFKEDIQKAQVSGQGDSLHEHIANLAGSPAIKKGILQTVKVVDELVKVMGRHKPENIVIEMARENQTTQKGQKNSRERMKRIEEGIKELGSQILKEHPVENTQLQNEKLYLYYLQNGRDMYVDQELDINRLSDYDVDAIVPQSFLKDDSIDNKVLTRSDKNRGKSDNVPSEEVVKKMKNYWRQLLNAKLITQRKFDNLTKAERGGLSELDKAGFIKRQLVETRQITKHVAQILDSRMNTKYDENDKLIREVKVITLKSKLVSDFRKDFQFYKVREINNYHHAHDAYLNAVVGTALIKKYPKLESEFVYGDYKVYDVRKMIAKSEQEIGKATAKYFFYSNIMNFFKTEITLANGEIRKRPLIETNGETGEIVWDKGRDFATVRKVLSMPQVNIVKKTEVQTGGFSKESILPKRNSDKLIARKKDWDPKKYGGFDSPTVAYSVLVVAKVEKGKSKKLKSVKELLGITIMERSSFEKNPIDFLEAKGYKEVKKDLIIKLPKYSLFELENGRKRMLASAGELQKGNELALPSKYVNFLYLASHYEKLKGSPEDNEQKQLFVEQHKHYLDEIIEQISEFSKRVILADANLDKVLSAYNKHRDKPIREQAENIIHLFTLTNLGAPAAFKYFDTTIDRKRYTSTKEVLDATLIHQSITGLYETRIDLSQLGGD

SEQ ID NO: 353 - protein, 1367 aa, Streptococcus pyogenes
  SITE (863)..(863): Xaa can be any naturally occurring amino acid
DKKYSIGLDIGTNSVGWAVITDEYKVPSKKFKVLGNTDRHSIKKNLIGALLFDSGETAEATRLKRTARRRYTRRKNRICYLQEIFSNEMAKVDDSFFHRLEESFLVEEDKKHERHPIFGNIVDEVAYHEKYPTIYHLRKKLVDSTDKADLRLIYLALAHMIKFRGHFLIEGDLNPDNSDVDKLFIQLVQTYNQLFEENPINASGVDAKAILSARLSKSRRLENLIAQLPGEKKNGLFGNLIALSLGLTPNFKSNFDLAEDAKLQLSKDTYDDDLDNLLAQIGDQYADLFLAAKNLSDAILLSDILRVNTEITKAPLSASMIKRYDEHHQDLTLLKALVRQQLPEKYKEIFFDQSKNGYAGYIDGGASQEEFYKFIKPILEKMDGTEELLVKLNREDLLRKQRTFDNGSIPHQIHLGELHAILRRQEDFYPFLKDNREKIEKILTFRIPYYVGPLARGNSRFAWMTRKSEETITPWNFEEVVDKGASAQSFIERMTNFDKNLPNEKVLPKHSLLYEYFTVYNELTKVKYVTEGMRKPAFLSGEQKKAIVDLLFKTNRKVTVKQLKEDYFKKIECFDSVEISGVEDRFNASLGTYHDLLKIIKDKDFLDNEENEDILEDIVLTLTLFEDREMIEERLKTYAHLFDDKVMKQLKRRRYTGWGRLSRKLINGIRDKQSGKTILDFLKSDGFANRNFMQLIHDDSLTFKEDIQKAQVSGQGDSLHEHIANLAGSPAIKKGILQTVKVVDELVKVMGRHKPENIVIEMARENQTTQKGQKNSRERMKRIEEGIKELGSQILKEHPVENTQLQNEKLYLYYLQNGRDMYVDQELDINRLSDYDVDHIVPQSFLKDDSIDNKVLTRSDKNXGKSDNVPSEEVVKKMKNYWRQLLNAKLITQRKFDNLTKAERGGLSELDKAGFIKRQLVETRQITKHVAQILDSRMNTKYDENDKLIREVKVITLKSKLVSDFRKDFQFYKVREINNYHHAHDAYLNAVVGTALIKKYPKLESEFVYGDYKVYDVRKMIAKSEQEIGKATAKYFFYSNIMNFFKTEITLANGEIRKRPLIETNGETGEIVWDKGRDFATVRKVLSMPQVNIVKKTEVQTGGFSKESILPKRNSDKLIARKKDWDPKKYGGFDSPTVAYSVLVVAKVEKGKSKKLKSVKELLGITIMERSSFEKNPIDFLEAKGYKEVKKDLIIKLPKYSLFELENGRKRMLASAGELQKGNELALPSKYVNFLYLASHYEKLKGSPEDNEQKQLFVEQHKHYLDEIIEQISEFSKRVILADANLDKVLSAYNKHRDKPIREQAENIIHLFTLTNLGAPAAFKYFDTTIDRKRYTSTKEVLDATLIHQSITGLYETRIDLSQLGGD

SEQ ID NO: 354 - protein, 1367 aa, Streptococcus pyogenes
DKKYSIGLDIGTNSVGWAVITDEYKVPSKKFKVLGNTDRHSIKKNLIGALLFDSGETAEATRLKRTARRRYTRRKNRICYLQEIFSNEMAKVDDSFFHRLEESFLVEEDKKHERHPIFGNIVDEVAYHEKYPTIYHLRKKLVDSTDKADLRLIYLALAHMIKFRGHFLIEGDLNPDNSDVDKLFIQLVQTYNQLFEENPINASGVDAKAILSARLSKSRRLENLIAQLPGEKKNGLFGNLIALSLGLTPNFKSNFDLAEDAKLQLSKDTYDDDLDNLLAQIGDQYADLFLAAKNLSDAILLSDILRVNTEITKAPLSASMIKRYDEHHQDLTLLKALVRQQLPEKYKEIFFDQSKNGYAGYIDGGASQEEFYKFIKPILEKMDGTEELLVKLNREDLLRKQRTFDNGSIPHQIHLGELHAILRRQEDFYPFLKDNREKIEKILTFRIPYYVGPLARGNSRFAWMTRKSEETITPWNFEEVVDKGASAQSFIERMTNFDKNLPNEKVLPKHSLLYEYFTVYNELTKVKYVTEGMRKPAFLSGEQKKAIVDLLFKTNRKVTVKQLKEDYFKKIECFDSVEISGVEDRFNASLGTYHDLLKIIKDKDFLDNEENEDILEDIVLTLTLFEDREMIEERLKTYAHLFDDKVMKQLKRRRYTGWGRLSRKLINGIRDKQSGKTILDFLKSDGFANRNFMQLIHDDSLTFKEDIQKAQVSGQGDSLHEHIANLAGSPAIKKGILQTVKVVDELVKVMGRHKPENIVIEMARENQTTQKGQKNSRERMKRIEEGIKELGSQILKEHPVENTQLQNEKLYLYYLQNGRDMYVDQELDINRLSDYDVDHIVPQSFLKDDSIDNKVLTRSDKNAGKSDNVPSEEVVKKMKNYWRQLLNAKLITQRKFDNLTKAERGGLSELDKAGFIKRQLVETRQITKHVAQILDSRMNTKYDENDKLIREVKVITLKSKLVSDFRKDFQFYKVREINNYHHAHDAYLNAVVGTALIKKYPKLESEFVYGDYKVYDVRKMIAKSEQEIGKATAKYFFYSNIMNFFKTEITLANGEIRKRPLIETNGETGEIVWDKGRDFATVRKVLSMPQVNIVKKTEVQTGGFSKESILPKRNSDKLIARKKDWDPKKYGGFDSPTVAYSVLVVAKVEKGKSKKLKSVKELLGITIMERSSFEKNPIDFLEAKGYKEVKKDLIIKLPKYSLFELENGRKRMLASAGELQKGNELALPSKYVNFLYLASHYEKLKGSPEDNEQKQLFVEQHKHYLDEIIEQISEFSKRVILADANLDKVLSAYNKHRDKPIREQAENIIHLFTLTNLGAPAAFKYFDTTIDRKRYTSTKEVLDATLIHQSITGLYETRIDLSQLGGD

SEQ ID NO: 355 - protein, 1053 aa, Staphylococcus aureus; identical to SEQ ID NO: 325

SEQ ID NO: 356 - protein, 1082 aa, N. meningitidis
MAAFKPNSINYILGLDIGIASVGWAMVEIDEEENPIRLIDLGVRVFERAEVPKTGDSLAMARRLARSVRRLTRRRAHRLLRTRRLLKREGVLQAANFDENGLIKSLPNTPWQLRAAALDRKLTPLEWSAVLLHLIKHRGYLSQRKNEGETADKELGALLKGVAGNAHALQTGDFRTPAELALNKFEKESGHIRNQRSDYSHTFSRKDLQAELILLFEKQKEFGNPHVSGGLKEGIETLLMTQRPALSGDAVQKMLGHCTFEPAEPKAAKNTYTAERFIWLTKLNNLRILEQGSERPLTDTERATLMDEPYRKSKLTYAQARKLLGLEDTAFFKGLRYGKDNAEASTLMEMKAYHAISRALEKEGLKDKKSPLNLSPELQDEIGTAFSLFKTDEDITGRLKDRIQPEILEALLKHISFDKFVQISLKALRRIVPLMEQGKRYDEACAEIYGDHYGKKNTEEKIYLPPIPADEIRNPVVLRALSQARKVINGVVRRYGSPARIHIETAREVGKSFKDRKEIEKRQEENRKDREKAAAKFREYFPNFVGEPKSKDILKLRLYEQQHGKCLYSGKEINLGRLNEKGYVEIDAALPFSRTWDDSFNNKVLVLGSENQNKGNQTPYEYFNGKDNSREWQEFKARVETSRFPRSKKQRILLQKFDEDGFKERNLNDTRYVNRFLCQFVADRMRLTGKGKKRVFASNGQITNLLRGFWGLRKVRAENDRHHALDAVVVACSTVAMQQKITRFVRYKEMNAFDGKTIDKETGEVLHQKTHFPQPWEFFAQEVMIRVFGKPDGKPEFEEADTLEKLRTLLAEKLSSRPEAVHEYVTPLFVSRAPNRKMSGQGHMETVKSAKRLDEGVSVLRVPLTQLKLKDLEKMVNREREPKLYEALKARLEAHKDDPAKAFAEPFYKYDKAGNRTQQVKAVRVEQVQKTGVWVRNHNGIADNATMVRVDVFEKGDKYYLVPIYSWQVAKGILPDRAVVQGKDEEDWQLIDDSFNFKFSLHPNDLVEVITKKARMFGYFASCHRGTGNINIRIHDLDHKIGKNGILEGIGVKTALSFQKYQIDELGKEIRPCRLKKRPPVR

SEQ ID NO: 357 - protein, 984 aa, C. jejuni
MARILAFDIGISSIGWAFSENDELKDCGVRIFTKVENPKTGESLALPRRLARSARKRLARRKARLNHLKHLIANEFKLNYEDYQSFDESLAKAYKGSLISPYELRFRALNELLSKQDFARVILHIAKRRGYDDIKNSDDKEKGAILKAIKQNEEKLANYQSVGEYLYKEYFQKFKENSKEFTNVRNKKESYERCIAQSFLKDELKLIFKKQREFGFSFSKKFEEEVLSVAFYKRALKDFSHLVGNCSFFTDEKRAPKNSPLAFMFVALTRIINLLNNLKNTEGILYTKDDLNALLNEVLKNGTLTYKQTKKLLGLSDDYEFKGEKGTYFIEFKKYKEFIKALGEHNLSQDDLNEIAKDITLIKDEIKLKKALAKYDLNQNQIDSLSKLEFKDHLNISFKALKLVTPLMLEGKKYDEACNELNLKVAINEDKKDFLPAFNETYYKDEVTNPVVLRAIKEYRKVLNALLKKYGKVHKINIELAREVGKNHSQRAKIEKEQNENYKAKKDAELECEKLGLKINSKNILKLRLFKEQKEFCAYSGEKIKISDLQDEKMLEIDHIYPYSRSFDDSYMNKVLVFTKQNQEKLNQTPFEAFGNDSAKWQKIEVLAKNLPTKKQKRILDKNYKDKEQKNFKDRNLNDTRYIARLVLNYTKDYLDFLPLSDDENTKLNDTQKGSKVHVEAKSGMLTSALRHTWGFSAKDRNNHLHHAIDAVIIAYANNSIVKAFSDFKKEQESNSAELYAKKISELDYKNKRKFFEPFSGFRQKVLDKIDEIFVSKPERKKPSGALHEETFRKEEEFYQSYGGKEGVLKALELGKIRKVNGKIVKNGDMFRVDIFKHKKTNKFYAVPIYTMDFALKVLPNKAVARSKKGEIKDWILMDENYEFCFSLYKDSLILIQTKDMQEPEFVYYNAFTSSTVSLIVSKHDNKFETLSKNQKILFKNANEKEVIAKSIGIQNLKVFEKYIVSALGEVTKAEFRQREDFKK

SEQ ID NO: 358 - protein, 1087 aa, G. stearothermophilus
MRYKIGLDIGITSVGWAVMNLDIPRIEDLGVRIFDRAENPQTGESLALPRRLARSARRRLRRRKHRLERIRRLVIREGILTKEELDKLFEEKHEIDVWQLRVEALDRKLNNDELARVLLHLAKRRGFKSNRKSERSNKENSTMLKHIEENRAILSSYRTVGEMIVKDPKFALHKRNKGENYTNTIARDDLEREIRLIFSKQREFGNMSCTEEFENEYITIWASQRPVASKDDIEKKVGFCTFEPKEKRAPKATYTFQSFIAWEHINKLRLISPSGARGLTDEERRLLYEQAFQKNKITYHDIRTLLHLPDDTYFKGIVYDRGESRKQNENIRFLELDAYHQIRKAVDKVYGKGKSSSFLPIDFDTFGYALTLFKDDADIHSYLRNEYEQNGKRMPNLANKVYDNELIEELLNLSFTKFGHLSLKALRSILPYMEQGEVYSSACERAGYTFTGPKKKQKTMLLPNIPPIANPVVMRALTQARKVVNAIIKKYGSPVSIHIELARDLSQTFDERRKTKKEQDENRKKNETAIRQLMEYGLTLNPTGHDIVKFKLWSEQNGRCAYSLQPIEIERLLEPGYVEVDHVIPYSRSLDDSYTNKVLVLTRENREKGNRIPAEYLGVGTERWQQFETFVLTNKQFSKKKRDRLLRLHYDENEETEFKNRNLNDTRYISRFFANFIREHLKFAESDDKQKVYTVNGRVTAHLRSRWEFNKNREESDLHHAVDAVIVACTTPSDIAKVTAFYQRREQNKELAKKTEPHFPQPWPHFADELRARLSKHPKESIKALNLGNYDDQKLESLQPVFVSRMPKRSVTGAAHQETLRRYVGIDERSGKIQTVVKTKLSEIKLDASGHFPMYGKESDPRTYEAIRQRLLEHNNDPKKAFQEPLYKPKKNGEPGPVIRTVKIIDTKNQVIPLNDGKTVAYNSNIVRVDVFEKDGKYYCVPVYTMDIMKGILPNKAIEPNKPYSEWKEMTEDYTFRFSLYPNDLIRIELPREKTVKTAAGEEINVKDVFVYYKTIDSANGGLELISHDHRFSLRGVGSRTLKRFEKYQVDVLGNIYKVRGEKRVGLASSAHSKPGKTIRPLQSTRD

SEQ ID NO: 359 - protein, 1228 aa, L. bacterium
MSKLEKFTNCYSLSKTLRFKAIPVGKTQENIDNKRLLVEDEKRAEDYKGVKKLLDRYYLSFINDVLHSIKLKNLNNYISLFRKKTRTEKENKELENLEINLRKEIAKAFKGNEGYKSLFKKDIIETILPEFLDDKDEIALVNSFNGFTTAFTGFFDNRENMFSEEAKSTSIAFRCINENLTRYISNMDIFEKVDAIFDKHEVQEIKEKILNSDYDVEDFFEGEFFNFVLTQEGIDVYNAIIGGFVTESGEKIKGLNEYINLYNQKTKQKLPKFKPLYKQVLSDRESLSFYGEGYTSDEEVLEVFRNTLNKNSEIFSSIKKLEKLFKNFDEYSSAGIFVKNGPAISTISKDIFGEWNVIRDKWNAEYDDIHLKKKAVVTEKYEDDRRKSFKKIGSFSLEQLQEYADADLSVVEKLKEIIIQKVDEIYKVYGSSEKLFDADFVLEKSLKKNDAVVAIMKDLLDSVKSFENYIKAFFGEGKETNRDESFYGDFVLAYDILLKVDHIYDAIRNYVTQKPYSKDKFKLYFQNPQFMGGWDKDKETDYRATILRYGSKYYLAIMDKKYAKCLQKIDKDDVNGNYEKINYKLLPGPNKMLPKVFFSKKWMAYYNPSEDIQKIYKNGTFKKGDMFNLNDCHKLIDFFKDSISRYPKWSNAYDFNFSETEKYKDIAGFYREVEEQGYKVSFESASKKEVDKLVEEGKLYMFQIYNKDFSDKSHGTPNLHTMYFKLLFDENNHGQIRLSGGAELFMRRASLKKEELVVHPANSPIANKNPDNPKKTTTLSYDVYKDKRFSEDQYELHIPIAINKCPKNIFKINTEVRVLLKHDDNPYVIGIDRGERNLLYIVVVDGKGNIVEQYSLNEIINNFNGIRIKTDYHSLLDKKEKERFEARQNWTSIENIKELKAGYISQVVHKICELVEKYDAVIALEDLNSGFKNSRVKVEKQVYQKFEKMLIDKLNYMVDKKSNPCATGGALKGYQITNKFESFKSMSTQNGFIFYIPAWLTSKIDPSTGFVNLLKTKYTSIADSKKFISSFDRIMYVPEEDLFEFALDYKNFSRTDADYIKKWKLYSYGNRIRIFRNPKKNNVFDWEEVCLTSAYKELFNKYGINYQQGDIRALLCEQSDKAFYSSFMALMSLMLQMRNSITGRTDVDFLISPVKNSDGIFYDSRNYEAQENAILPKNADANGAYNIARKVLWAIGQFKKAEDEKLDKVKIAISNKEWLEYAQTSVKH

SEQ ID NO: 360 - protein, 1108 aa, B. hisashii
MATRSFILKIEPNEEVKKGLWKTHEVLNHGIAYYMNILKLIRQEAIYEHHEQDPKNPKKVSKAEIQAELWDFVLKMQKCNSFTHEVDKDEVFNILRELYEELVPSSVEKKGEANQLSNKFLYPLVDPNSQSGKGTASSGRKPRWYNLKIAGDPSWEEEKKKWEEDKKKDPLAKILGKLAEYGLIPLFIPYTDSNEPIVKEIKWMEKSRNQSVRRLDKDMFIQALERFLSWESWNLKVKEEYEKVEKEYKTLEERIKEDIQALKALEQYEKERQEQLLRDTLNTNEYRLSKRGLRGWREIIQKWLKMDENEPSEKYLEVFKDYQRKHPREAGDYSVYEFLSKKENHFIWRNHPEYPYLYATFCEIDKKKKDAKQQATFTLADPINHPLWVRFEERSGSNLNKYRILTEQLHTEKLKKKLTVQLDRLIYPTESGGWEEKGKVDIVLLPSRQFYNQIFLDIEEKGKHAFTYKDESIKFPLKGTLGGARVQFDRDHLRRYPHKVESGNVGRIYFNMTVNIEPTESPVSKSLKIHRDDFPKVVNFKPKELTEWIKDSKGKKLKSGIESLEIGLRVMSIDLGQRQAAAASIFEVVDQKPDIEGKLFFPIKGTELYAVHRASFNIKLPGETLVKSREVLRKAREDNLKLMNQKLNFLRNVLHFQQFEDITEREKRVTKWISRQENSDVPLVYQDELIQIRELMYKPYKDWVAFLKQLHKRLEVEIGKEVKHWRKSLSDGRKGLYGISLKNIDEIDRTRKFLLRWSLRPTEPGEVRRLEPGQRFAIDQLNHLNALKEDRLKKMANTIIMHALGYCYDVRKKKWQAKNPACQIILFEDLSNYNPYEERSRFENSKLMKWSRREIPRQVALQGEIYGLQVGEVGAQFSSRFHAKTGSPGIRCSVVTKEKLQDNRFFKNLQREGRLTLDKIAVLKEGDLYPDKGGEKFISLSKDRKCVTTHADINAAQNLQKRFWTRTHGFYKVYCKAYQVDGQTVYIPESKDQKQKIIEEFGEGYFILKDGVYEWVNAGKLKIKKGSSKQSSSELVDSDILKDSFDLASELKGEKLMLYRDPSGNVFPSDKWMAAGVFFGKLERILISKLTNQYSISTIEDDSSKQSM

SEQ ID NO: 361 - protein, 1307 aa, Unknown
  Acidaminococcus sp. (strain BV3L6)
MTQFEGFTNLYQVSKTLRFELIPQGKTLKHIQEQGFIEEDKARNDHYKELKPIIDRIYKTYADQCLQLVQLDWENLSAAIDSYRKEKTEETRNALIEEQATYRNAIHDYFIGRTDNLTDAINKRHAEIYKGLFKAELFNGKVLKQLGTVTTTEHENALLRSFDKFTTYFSGFYENRKNVFSAEDISTAIPHRIVQDNFPKFKENCHIFTRLITAVPSLREHFENVKKAIGIFVSTSIEEVFSFPFYNQLLTQTQIDLYNQLLGGISREAGTEKIKGLNEVLNLAIQKNDETAHIIASLPHRFIPLFKQILSDRNTLSFILEEFKSDEEVIQSFCKYKTLLRNENVLETAEALFNELNSIDLTHIFISHKKLETISSALCDHWDTLRNALYERRISELTGKITKSAKEKVQRSLKHEDINLQEIISAAGKELSEAFKQKTSEILSHAHAALDQPLPTTLKKQEEKEILKSQLDSLLGLYHLLDWFAVDESNEVDPEFSARLTGIKLEMEPSLSFYNKARNYATKKPYSVEKFKLNFQMPTLASGWDVNKEKNNGAILFVKNGLYYLGIMPKQKGRYKALSFEPTEKTSEGFDKMYYDYFPDAAKMIPKCSTQLKAVTAHFQTHTTPILLSNNFIEPLEITKEIYDLNNPEKEPKKFQTAYAKKTGDQKGYREALCKWIDFTRDFLSKYTKTTSIDLSSLRPSSQYKDLGEYYAELNPLLYHISFQRIAEKEIMDAVETGKLYLFQIYNKDFAKGHHGKPNLHTLYWTGLFSPENLAKTSIKLNGQAELFYRPKSRMKRMAHRLGEKMLNKKLKDQKTPIPDTLYQELYDYVNHRLSHDLSDEARALLPNVITKEVSHEIIKDRRFTSDKFFFHVPITLNYQAANSPSKFNQRVNAYLKEHPETPIIGIDRGERNLIYITVIDSTGKILEQRSLNTIQQFDYQKKLDNREKERVAARQAWSVVGTIKDLKQGYLSQVIHEIVDLMIHYQAVVVLENLNFGFKSKRTGIAEKAVYQQFEKMLIDKLNCLVLKDYPAEKVGGVLNPYQLTDQFTSFAKMGTQSGFLFYVPAPYTSKIDPLTGFVDPFVWKTIKNHESRKHFLEGFDFLHYDVKTGDFILHFKMNRNLSFQRGLPGFMPAWDIVFEKNETQFDAKGTPFIAGKRIVPVIENHRFTGRYRDLYPANELIALLEEKGIVFRDGSNILPKLLENDDSHAIDTMVALIRSVLQMRNSNAATGEDYINSPVRDLNGVCFDSRFQNPEWPMDADANGAYHIALKGQLLLNHLKESKDLKLQNGISNQDWLAYIQELRN

SEQ ID NO: 362 - protein, 1307 aa, Unknown
  AsCas12a nickase
MTQFEGFTNLYQVSKTLRFELIPQGKTLKHIQEQGFIEEDKARNDHYKELKPIIDRIYKTYADQCLQLVQLDWENLSAAIDSYRKEKTEETRNALIEEQATYRNAIHDYFIGRTDNLTDAINKRHAEIYKGLFKAELFNGKVLKQLGTVTTTEHENALLRSFDKFTTYFSGFYENRKNVFSAEDISTAIPHRIVQDNFPKFKENCHIFTRLITAVPSLREHFENVKKAIGIFVSTSIEEVFSFPFYNQLLTQTQIDLYNQLLGGISREAGTEKIKGLNEVLNLAIQKNDETAHIIASLPHRFIPLFKQILSDRNTLSFILEEFKSDEEVIQSFCKYKTLLRNENVLETAEALFNELNSIDLTHIFISHKKLETISSALCDHWDTLRNALYERRISELTGKITKSAKEKVQRSLKHEDINLQEIISAAGKELSEAFKQKTSEILSHAHAALDQPLPTTLKKQEEKEILKSQLDSLLGLYHLLDWFAVDESNEVDPEFSARLTGIKLEMEPSLSFYNKARNYATKKPYSVEKFKLNFQMPTLASGWDVNKEKNNGAILFVKNGLYYLGIMPKQKGRYKALSFEPTEKTSEGFDKMYYDYFPDAAKMIPKCSTQLKAVTAHFQTHTTPILLSNNFIEPLEITKEIYDLNNPEKEPKKFQTAYAKKTGDQKGYREALCKWIDFTRDFLSKYTKTTSIDLSSLRPSSQYKDLGEYYAELNPLLYHISFQRIAEKEIMDAVETGKLYLFQIYNKDFAKGHHGKPNLHTLYWTGLFSPENLAKTSIKLNGQAELFYRPKSRMKRMAHRLGEKMLNKKLKDQKTPIPDTLYQELYDYVNHRLSHDLSDEARALLPNVITKEVSHEIIKDRRFTSDKFFFHVPITLNYQAANSPSKFNQRVNAYLKEHPETPIIGIDRGERNLIYITVIDSTGKILEQRSLNTIQQFDYQKKLDNREKERVAARQAWSVVGTIKDLKQGYLSQVIHEIVDLMIHYQAVVVLENLNFGFKSKRTGIAEKAVYQQFEKMLIDKLNCLVLKDYPAEKVGGVLNPYQLTDQFTSFAKMGTQSGFLFYVPAPYTSKIDPLTGFVDPFVWKTIKNHESRKHFLEGFDFLHYDVKTGDFILHFKMNRNLSFQRGLPGFMPAWDIVFEKNETQFDAKGTPFIAGKRIVPVIENHRFTGRYRDLYPANELIALLEEKGIVFRDGSNILPKLLENDDSHAIDTMVALIRSVLQMANSNAATGEDYINSPVRDLNGVCFDSRFQNPEWPMDADANGAYHIALKGQLLLNHLKESKDLKLQNGISNQDWLAYIQELRN

SEQ ID NO: 363 - protein, 1259 aa, Lachnospiraceae bacterium
MNYKTGLEDFIGKESLSKTLRNALIPTESTKIHMEEMGVIRDDELRAEKQQELKEIMDDYYRTFIEEKLGQIQGIQWNSLFQKMEETMEDISVRKDLDKIQNEKRKEICCYFTSDKRFKDLFNAKLITDILPNFIKDNKEYTEEEKAEKEQTRVLFQRFATAFTNYFNQRRNNFSEDNISTAISFRIVNENSEIHLQNMRAFQRIEQQYPEEVCGMEEEYKDMLQEWQMKHIYSVDFYDRELTQPGIEYYNGICGKINEHMNQFCQKNRINKNDFRMKKLHKQILCKKSSYYEIPFRFESDQEVYDALNEFIKTMKKKEIIRRCVHLGQECDDYDLGKIYISSNKYEQISNALYGSWDTIRKCIKEEYMDALPGKGEKKEEKAEAAAKKEEYRSIADIDKIISLYGSEMDRTISAKKCITEICDMAGQISIDPLVCNSDIKLLQNKEKTTEIKTILDSFLHVYQWGQTFIVSDIIEKDSYFYSELEDVLEDFEGITTLYNHVRSYVTQKPYSTVKFKLHFGSPTLANGWSQSKEYDNNAILLMRDQKFYLGIFNVRNKPDKQIIKGHEKEEKGDYKKMIYNLLPGPSKMLPKVFITSRSGQETYKPSKHILDGYNEKRHIKSSPKFDLGYCWDLIDYYKECIHKHPDWKNYDFHFSDTKDYEDISGFYREVEMQGYQIKWTYISADEIQKLDEKGQIFLFQIYNKDFSVHSTGKDNLHTMYLKNLFSEENLKDIVLKLNGEAELFFRKASIKTPIVHKKGSVLVNRSYTQTVGNKEIRVSIPEEYYTEIYNYLNHIGKGKLSSEAQRYLDEGKIKSFTATKDIVKNYRYCCDHYFLHLPITINFKAKSDVAVNERTLAYIAKKEDIHIIGIDRGERNLLYISVVDVHGNIREQRSFNIVNGYDYQQKLKDREKSRDAARKNWEEIEKIKELKEGYLSMVIHYIAQLVVKYNAVVAMEDLNYGFKTGRFKVERQVYQKFETMLIEKLHYLVFKDREVCEEGGVLRGYQLTYIPESLKKVGKQCGFIFYVPAGYTSKIDPTTGFVNLFSFKNLTNRESRQDFVGKFDEIRYDRDKKMFEFSFDYNNYIKKGTILASTKWKVYTNGTRLKRIVVNGKYTSQSMEVELTDAMEKMLQRAGIEYHDGKDLKGQIVEKGIEAEIIDIFRLTVQMRNSRSESEDREYDRLISPVLNDKGEFFDTATADKTLPQDADANGAYCIALKGLYEVKQIKENWKENEQFPRNKLVQDNKTWFDFMQKKRYL

SEQ ID NO: 364 - protein, 1306 aa, Prevotella copri
MAKNFEDFKRLYSLSKTLRFEAKPIGATLDNIVKSGLLDEDEHRAASYVKVKKLIDEYHKVFIDRVLDDGCLPLENKGNNNSLAEYYESYVSRAQDEDAKKKFKEIQQNLRSVIAKKLTEDKAYANLFGNKLIESYKDKEDKKKIIDSDLIQFINTAESTQLDSMSQDEAKELVKEFWGFVTYFYGFFDNRKNMYTAEEKSTGIAYRLVNENLPKFIDNIEAFNRAITRPEIQENMGVLYSDFSEYLNVESIQEMFQLDYYNMLLTQKQIDVYNAIIGGKTDDEHDVKIKGINEYINLYNQQHKDDKLPKLKALFKQILSDRNAISWLPEEFNSDQEVLNAIKDCYERLAENVLGDKVLKSLLGSLADYSLDGIFIRNDLQLTDISQKMFGNWGVIQNAIMQNIKRVAPARKHKESEEDYEKRIAGIFKKADSFSISYINDCLNEADPNNAYFVENYFATFGAVNTPTMQRENLFALVQNAYTEVAALLHSDYPTVKHLAQDKANVSKIKALLDAIKSLQHFVKPLLGKGDESDKDERFYGELASLWAELDTVTPLYNMIRNYMTRKPYSQKKIKLNFENPQLLGGWDANKEKDYATIILRRNGLYYLAIMDKDSRKLLGKAMPSDGECYEKMVYKFFKDVTTMIPKCSTQLKDVQAYFKVNTDDYVLNSKAFNKPLTITKEVFDLNNVLYGKYKKFQKGYLTATGDNVGYTHAVNVWIKFCMDFLNSYDSTCIYDFSSLKPESYLSLDAFYQDANLLLYKLSFARASVSYINQLVEEGKMYLFQIYNKDFSEYSKGTPNMHTLYWKALFDERNLADVVYKLNGQAEMFYRKKSIENTHPTHPANHPILNKNKDNKKKESLFDYDLIKDRRYTVDKFMFHVPITMNFKSVGSENINQDVKAYLRHADDMHIIGIDRGERHLLYLVVIDLQGNIKEQYSLNEIVNEYNGNTYHTNYHDLLDVREEERLKARQSWQTIENIKELKEGYLSQVIHKITQLMVRYHAIVVLEDLSKGFMRSRQKVEKQVYQKFEKMLIDKLNYLVDKKTDVSTPGGLLNAYQLTCKSDSSQKLGKQSGFLFYIPAWNTSKIDPVTGFVNLLDTHSLNSKEKIKAFFSKFDAIRYNKDKKWFEFNLDYDKFGKKAEDTRTKWTLCTRGMRIDTFRNKEKNSQWDNQEVDLTTEMKSLLEHYYIDIHGNLKDAISAQTDKAFFTGLLHILKLTLQMRNSITGTETDYLVSPVADENGIFYDSRSCGNQLPENADANGAYNIARKGLMLIEQIKNAEDLNNVKFDISNKAWLNFAQQKPYKNG

SEQ ID NO: 365 - protein, 1142 aa, Eubacterium rectale
MFSAKLISDILPEFVIHNNNYSASEKEEKTQVIKLFSRFATSFKDYFKNRANCFSANDISSSSCHRIVNDNAEIFFSNALVYRRIVKNLSNDDINKISGDMKDSLKEMSLEEIYSYEKYGEFITQEGISFYNDICGKVNLFMNLYCQKNKENKNLYKLRKLHKQILCIADTSYEVPYKFESDEEVYQSVNGFLDNISSKHIVERLRKIGENYNGYNLDKIYIVSKFYESVSQKTYRDWETINTALEIHYNNILPGNGKSKADKVKKAVKNDLQKSITEINELVSNYKLCPDDNIKAETYIHEISHILNNFEAQELKYNPEIHLVESELKASELKNVLDVIMNAFHWCSVFMTEELVDKDNNFYAELEEIYDEIYPVISLYNLVRNYVTQKPYSTKKIKLNFGIPTLADGWSKSKEYSNNAIILMRDNLYYLGIFNAKNKPDKKIIEGNTSENKGDYKKMIYNLLPGPNKMIPKVFLSSKTGVETYKPSAYILEGYKQNKHLKSSKDFDITFCHDLIDYFKNCIAIHPEWKNFGFDFSDTSTYEDISGFYREVELQGYKIDWTYISEKDIDLLQEKGQLYLFQIYNKDFSKKSSGNDNLHTMYLKNLFSEENLKDIVLKLNGEAEIFFRKSSIKNPIIHKKGSILVNRTYEAEEKDQFGNIQIVRKTIPENIYQELYKYFNDKSDKELSDEAAKLKNVVGHHEAATNIVKDYRYTYDKYFLHMPITINFKANKTSFINDRILQYIAKEKDLHVIGIDRGERNLIYVSVIDTCGNIVEQKSFNIVNGYDYQIKLKQQEGARQIARKEWKEIGKIKEIKEGYLSLVIHEISKMVIKYNAIIAMEDLSYGFKKGRFKVERQVYQKFETMLINKLNYLVFKDISITENGGLLKGYQLTYIPDKLKNVGHQCGCIFYVPAAYTSKIDPTTGFVNIFKFKDLTVDAKREFIKKFDSIRYDSDKNLFCFTFDYNNFITQNTVMSKSSWSVYTYGVRIKRRFVNGRFSNESDTIDITKDMEKTLEMTDINWRDGHDLRQDIIDYEIVQHIFEIFKLTVQMRNSLSELEDRDYDRLISPVLNENNIFYDSAKAGDALPKDADANGAYCIALKGLYEIKQITENWKEDGKFSRDKLKISNKDWFDFIQNKRYL

SEQ ID NO: 366 - protein, 1259 aa, Unknown
  Clostridium sp. AF34-10BH
MNYKTGLEDFIGKESLSKTLRNALIPTESTKIHMEEMGVIRDDELRAEKQQELKEIMDDYYRAFIEEKLGQIQGIQWNSLFQKMEETMEDISVRKDLDKIQNEKRKEICCYFTSDKRFKDLFNAKLITDILPNFIKDNKEYTEEEKAEKEQTRVLFQRFATAFTNYFNQRRNNFSEDNISTAISFRIVNENSEIHLQNMRAFQRIEQQYPEEVCGMEEEYKDMLQEWQMKHIYLVDFYDRVLTQPGIEYYNGICGKINEHMNQFCQKNRINKNDFRMKKLHKQILCKKSSYYEIPFRFESDQEVYDALNEFIKTMKEKEIICRCVHLGQKCDDYDLGKIYISSNKYEQISNALYGSWDTIRKCIKEEYMDALPGKGEKKEEKAEAAAKKEEYRSIADIDKIISLYGSEMDRTISAKKCITEICDMAGQISTDPLVCNSDIKLLQNKEKTTEIKTILDSFLHVYQWGQTFIVSDIIEKDSYFYSELEDVLEDFEGITTLYNHVRSYVTQKPYSTVKFKLHFGSPTLANGWSQSKEYDNNAILLMRDQKFYLGIFNVRNKPDKQIIKGHEKEEKGDYKKMIYNLLPGPSKMLPKVFITSRSGQETYKPSKHILDGYNEKRHIKSSPKFDLGYCWDLIDYYKECIHKHPDWKNYDFHFSDTKDYEDISGFYREVEMQGYQIKWTYISADEIQKLDEKGQIFLFQIYNKDFSVHSTGKDNLHTMYLKNLFSEENLKDIVLKLNGEAELFFRKASIKTPVVHKKGSVLVNRSYTQTVGDKEIRVSIPEEYYTEIYNYLNHIGRGKLSTEAQRYLEERKIKSFTATKDIVKNYRYCCDHYFLHLPITINFKAKSDIAVNERTLAYIAKKEDIHIIGIDRGERNLLYISVVDVHGNIREQRSFNIVNGYDYQQKLKDREKSRDAARKNWEEIEKIKELKEGYLSMVIHYIAQLVVKYNAVVAMEDLNYGFKTGRFKVERQVYQKFETMLIEKLHYLVFKDREVCEEGGVLRGYQLTYIPESLKKVGKQCGFIFYVPAGYTSKIDPTTGFVNLFSFKNLTNRESRQDFVGKFDEIRYDRDKKMFEFSFDYNNYIKKGTMLASTKWKVYTNGTRLKRIVVNGKYTSQSMEVELTDAMEKMLQRAGIEYHDGKDLKGQIVEKGIEAEIIDIFRLTVQMRNSRSESEDREYDRLISPVLNDKGEFFDTATADKTLPQDADANGAYCIALKGLYEVKQIKENWKENEQFPRNKLVQDNKTWFDFMQKKRYL

SEQ ID NO: 367 - protein, 1108 aa, Bacillus hisashii; identical to SEQ ID NO: 360

SEQ ID NO: 368 - protein, 1465 aa, Thermomonas hydrothermalis
MSEKTTQRAYTLRLNRASGECAVCQNNSCDCWHDALWATHKAVNRGAKAFGDWLLTLRGGLCHTLVEMEVPAKGNNPPQRPTDQERRDRRVLLALSWLSVEDEHGAPKEFIVATGRDSADDRAKKVEEKLREILEKRDFQEHEIDAWLQDCGPSLKAHIREDAVWVNRRALFDAAVERIKTLTWEEAWDFLEPFFGTQYFAGIGDGKDKDDAEGPARQGEKAKDLVQKAGQWLSARFGIGTGADFMSMAEAYEKIAKWASQAQNGDNGKATIEKLACALRPSEPPTLDTVLKCISGPGHKSATREYLKTLDKKSTVTQEDLNQLRKLADEDARNCRKKVGKKGKKPWADEVLKDVENSCELTYLQDNSPARHREFSVMLDHAARRVSMAHSWIKKAEQRRRQFESDAQKLKNLQERAPSAVEWLDRFCESRSMTTGANTGSGYRIRKRAIEGWSYVVQAWAEASCDTEDKRIAAARKVQADPEIEKFGDIQLFEALAADEAICVWRDQEGTQNPSILIDYVTGKTAEHNQKRFKVPAYRHPDELRHPVFCDFGNSRWSIQFAIHKEIRDRDKGAKQDTRQLQNRHGLKMRLWNGRSMTDVNLHWSSKRLTADLALDQNPNPNPTEVTRADRLGRAASSAFDHVKIKNVFNEKEWNGRLQAPRAELDRIAKLEEQGKTEQAEKLRKRLRWYVSFSPCLSPSGPFIVYAGQHNIQPKRSGQYAPHAQANKGRARLAQLILSRLPDLRILSVDLGHRFAAACAVWETLSSDAFRREIQGLNVLAGGSGEGDLFLHVEMTGDDGKRRTVVYRRIGPDQLLDNTPHPAPWARLDRQFLIKLQGEDEGVREASNEELWTVHKLEVEVGRTVPLIDRMVRSGFGKTEKQKERLKKLRELGWISAMPNEPSAETDEKEGEIRSISRSVDELMSSALGTLRLALKRHGNRARIAFAMTADYKPMPGGQKYYFHEAKEASKNDDETKRRDNQIEFLQDALSLWHDLFSSPDWEDNEAKKLWQNHIATLPNYQTPEEISAELKRVERNKKRKENRDKLRTAAKALAENDQLRQHLHDTWKERWESDDQQWKERLRSLKDWIFPRGKAEDNPSIRHVGGLSITRINTISGLYQILKAFKMRPEPDDLRKNIPQKGDDELENFNRRLLEARDRLREQRVKQLASRIIEAALGVGRIKIPKNGKLPKRPRTTVDTPCHAVVIESLKTYRPDDLRTRRENRQLMQWSSAKVRKYLKEGCELYGLHFLEVPANYTSRQCSRTGLPGIRCDDVPTGDFLKAPWWRRAINTAREKNGGDAKDRFLVDLYDHLNNLQSKGEALPATVRVPRQGGNLFIAGAQLDDTNKERRAIQADLNAAANIGLRALLDPDWRGRWWYVPCKDGTSEPALDRIEGSTAFNDVRSLPTGDNSSRRAPREIENLWRDPSGDSLESGTWSPTRAYWDTVQSRVIELLRRHAGLPTS

SEQ ID NO: 369 - protein, 1090 aa, Laceyella sacchari
MSIRSFKLKLKTKSGVNAEQLRRGLWRTHQLINDGIAYYMNWLVLLRQEDLFIRNKETNEIEKRSKEEIQAVLLERVHKQQQRNQWSGEVDEQTLLQALRQLYEEIVPSVIGKSGNASLKARFFLGPLVDPNNKTTKDVSKSGPTPKWKKMKDAGDPNWVQEYEKYMAERQTLVRLEEMGLIPLFPMYTDEVGDIHWLPQASGYTRTWDRDMFQQAIERLLSWESWNRRVRERRAQFEKKTHDFASRFSESDVQWMNKLREYEAQQEKSLEENAFAPNEPYALTKKALRGWERVYHSWMRLDSAASEEAYWQEVATCQTAMRGEFGDPAIYQFLAQKENHDIWRGYPERVIDFAELNHLQRELRRAKEDATFTLPDSVDHPLWVRYEAPGGTNIHGYDLVQDTKRNLTLILDKFILPDENGSWHEVKKVPFSLAKSKQFHRQVWLQEEQKQKKREVVFYDYSTNLPHLGTLAGAKLQWDRNFLNKRTQQQIEETGEIGKVFFNISVDVRPAVEVKNGRLQNGLGKALTVLTHPDGTKIVTGWKAEQLEKWVGESGRVSSLGLDSLSEGLRVMSIDLGQRTSATVSVFEITKEAPDNPYKFFYQLEGTEMFAVHQRSFLLALPGENPPQKIKQMREIRWKERNRIKQQVDQLSAILRLHKKVNEDERIQAIDKLLQKVASWQLNEEIATAWNQALSQLYSKAKENDLQWNQAIKNAHHQLEPVVGKQISLWRKDLSTGRQGIAGLSLWSIEELEATKKLLTRWSKRSREPGVVKRIERFETFAKQIQHHINQVKENRLKQLANLIVMTALGYKYDQEQKKWIEVYPACQVVLFENLRSYRFSFERSRRENKKLMEWSHRSIPKLVQMQGELFGLQVADVYAAYSSRYHGRTGAPGIRCHALTEADLRNETNIIHELIEAGFIKEEHRPYLQQGDLVPWSGGELFATLQKPYDNPRILTLHADINAAQNIQKRFWHPSMWFRVNCESVMEGEIVTYVPKNKTVHKKQGKTFRFVKVEGSDVYEWAKWSKNRNKNTFSSITERKPPSSMILFRDPSGTFFKEQEWVEQKTFWGKVQSMIQAYMKKTIVQRMEE

SEQ ID NO: 370 - protein, 1194 aa, Dsulfonatronum thiodismutans
MVLGRKDDTAELRRALWTTHEHVNLAVAEVERVLLRCRGRSYWTLDRRGDPVHVPESQVAEDALAMAREAQRRNGWPVVGEDEEILLALRYLYEQIVPSCLLDDLGKPLKGDAQKIGTNYAGPLFDSDTCRRDEGKDVACCGPFHEVAGKYLGALPEWATPISKQEFDGKDASHLRFKATGGDDAFFRVSIEKANAWYEDPANQDALKNKAYNKDDWKKEKDKGISSWAVKYIQKQLQLGQDPRTEVRRKLWLELGLLPLFIPVFDKTMVGNLWNRLAVRLALAHLLSWESWNHRAVQDQALARAKRDELAALFLGMEDGFAGLREYELRRNESIKQHAFEPVDRPYVVSGRALRSWTRVREEWLRHGDTQESRKNICNRLQDRLRGKFGDPDVFHWLAEDGQEALWKERDCVTSFSLLNDADGLLEKRKGYALMTFADARLHPRWAMYEAPGGSNLRTYQIRKTENGLWADVVLLSPRNESAAVEEKTFNVRLAPSGQLSNVSFDQIQKGSKMVGRCRYQSANQQFEGLLGGAEILFDRKRIANEQHGATDLASKPGHVWFKLTLDVRPQAPQGWLDGKGRPALPPEAKHFKTALSNKSKFADQVRPGLRVLSVDLGVRSFAACSVFELVRGGPDQGTYFPAADGRTVDDPEKLWAKHERSFKITLPGENPSRKEEIARRAAMEELRSLNGDIRRLKAILRLSVLQEDDPRTEHLRLFMEAIVDDPAKSALNAELFKGFGDDRFRSTPDLWKQHCHFFHDKAEKVVAERFSRWRTETRPKSSSWQDWRERRGYAGGKSYWAVTYLEAVRGLILRWNMRGRTYGEVNRQDKKQFGTVASALLHHINQLKEDRIKTGADMIIQAARGFVPRKNGAGWVQVHEPCRLILFEDLARYRFRTDRSRRENSRLMRWSHREIVNEVGMQGELYGLHVDTTEAGFSSRYLASSGAPGVRCRHLVEEDFHDGLPGMHLVGELDWLLPKDKDRTANEARRLLGGMVRPGMLVPWDGGELFATLNAASQLHVIHADINAAQNLQRRFWGRCGEAIRIVCNQLSVDGSTRYEMAKAPKARLLGALQQLKNGDAPFHLTSIPNSQKPENSYVMTPTNAGKKYRAGPGEKSSGEEDELALDIVEQAEELAQGRKTFFRDPSGVFFAPDRWLPSEIYWSRIRRRIWQVTLERNSSGRQERAEMDEMPY

SEQ ID NO: 371 - protein, 1300 aa, Francisella novicida
MSIYQEFVNKYSLSKTLRFELIPQGKTLENIKARGLILDDEKRAKDYKKAKQIIDKYHQFFIEEILSSVCISEDLLQNYSDVYFKLKKSDDDNLQKDFKSAKDTIKKQISEYIKDSEKFKNLFNQNLIDAKKGQESDLILWLKQSKDNGIELFKANSDITDIDEALEIIKSFKGWTTYFKGFHENRKNVYSSNDIPTSIIYRIVDDNLPKFLENKAKYESLKDKAPEAINYEQIKKDLAEELTFDIDYKTSEVNQRVFSLDEVFEIANFNNYLNQSGITKFNTIIGGKFVNGENTKRKGINEYINLYSQQINDKTLKKYKMSVLFKQILSDTESKSFVIDKLEDDSDVVTTMQSFYEQIAAFKTVEEKSIKETLSLLFDDLKAQKLDLSKIYFKNDKSLTDLSQQVFDDYSVIGTAVLEYITQQIAPKNLDNPSKKEQELIAKKTEKAKYLSLETIKLALEEFNKHRDIDKQCRFEEILANFAAIPMIFDEIAQNKDNLAQISIKYQNQGKKDLLQASAEDDVKAIKDLLDQTNNLLHKLKIFHISQSEDKANILDKDEHFYLVFEECYFELANIVPLYNKIRNYITQKPYSDEKFKLNFENSTLANGWDKNKEPDNTAILFIKDDKYYLGVMNKKNNKIFDDKAIKENKGEGYKKIVYKLLPGANKMLPKVFFSAKSIKFYNPSEDILRIRNHSTHTKNGSPQKGYEKFEFNIEDCRKFIDFYKQSISKHPEWKDFGFRFSDTQRYNSIDEFYREVENQGYKLTFENISESYIDSVVNQGKLYLFQIYNKDFSAYSKGRPNLHTLYWKALFDERNLQDVVYKLNGEAELFYRKQSIPKKITHPAKEAIANKNKDNPKKESVFEYDLIKDKRFTEDKFFFHCPITINFKSSGANKFNDEINLLLKEKANDVHILSIDRGERHLAYYTLVDGKGNIIKQDTFNIIGNDRMKTNYHDKLAAIEKDRDSARKDWKKINNIKEMKEGYLSQVVHEIAKLVIEYNAIVVFEDLNFGFKRGRFKVEKQVYQKLEKMLIEKLNYLVFKDNEFDKTGGVLRAYQLTAPFETFKKMGKQTGIIYYVPAGFTSKICPVTGFVNQLYPKYESVSKSQEFFSKFDKICYNLDKGYFEFSFDYKNFGDKAAKGKWTIASFGSRLINFRNSDKNHNWDTREVYPTKELEKLLKDYSIEYGHGECIKAAICGESDKKFFAKLTSVLNTILQMRNSKTGTELDYLISPVADVNGNFFDSRQAPKNMPQDADANGAYHIGLKGLMLLGRIKNNQEGKKLNLVIKNEEYFEFVQNRNN

SEQ ID NO: 372 - protein, 1082 aa, Geobacillus thermodenitrificans; identical to SEQ ID NO: 335

SEQ ID NO: 373 - protein, 887 aa, Natronobacterium gregoryi; identical to SEQ ID NO: 5

SEQ ID NO: 374 - protein, 1367 aa, Artificial Sequence
  Synthetic
DKKYSIGLDIGTNSVGWAVITDEYKVPSKKFKVLGNTDRHSIKKNLIGALLFDSGETAEATRLKRTARRRYTRRKNRICYLQEIFSNEMAKVDDSFFHRLEESFLVEEDKKHERHPIFGNIVDEVAYHEKYPTIYHLRKKLVDSTDKADLRLIYLALAHMIKFRGHFLIEGDLNPDNSDVDKLFIQLVQTYNQLFEENPINASGVDAKAILSARLSKSRRLENLIAQLPGEKKNGLFGNLIALSLGLTPNFKSNFDLAEDAKLQLSKDTYDDDLDNLLAQIGDQYADLFLAAKNLSDAILLSDILRVNTEITKAPLSASMIKRYDEHHQDLTLLKALVRQQLPEKYKEIFFDQSKNGYAGYIDGGASQEEFYKFIKPILEKMDGTEELLVKLNREDLLRKQRTFDNGSIPHQIHLGELHAILRRQEDFYPFLKDNREKIEKILTFRIPYYVGPLARGNSRFAWMTRKSEETITPWNFEEVVDKGASAQSFIERMTNFDKNLPNEKVLPKHSLLYEYFTVYNELTKVKYVTEGMRKPAFLSGEQKKAIVDLLFKTNRKVTVKQLKEDYFKKIECFDSVEISGVEDRFNASLGTYHDLLKIIKDKDFLDNEENEDILEDIVLTLTLFEDREMIEERLKTYAHLFDDKVMKQLKRRRYTGWGRLSRKLINGIRDKQSGKTILDFLKSDGFANRNFMQLIHDDSLTFKEDIQKAQVSGQGDSLHEHIANLAGSPAIKKGILQTVKVVDELVKVMGRHKPENIVIEMARENQTTQKGQKNSRERMKRIEEGIKELGSQILKEHPVENTQLQNEKLYLYYLQNGRDMYVDQELDINRLSDYDVDAIVPQSFLKDDSIDNKVLTRSDKNRGKSDNVPSEEVVKKMKNYWRQLLNAKLITQRKFDNLTKAERGGLSELDKAGFIKRQLVETRQITKHVAQILDSRMNTKYDENDKLIREVKVITLKSKLVSDFRKDFQFYKVREINNYHHAHDAYLNAVVGTALIKKYPKLESEFVYGDYKVYDVRKMIAKSEQEIGKATAKYFFYSNIMNFFKTEITLANGEIRKRPLIETNGETGEIVWDKGRDFATVRKVLSMPQVNIVKKTEVQTGGFSKESILPKRNSDKLIARKKDWDPKKYGGFVSPTVAYSVLVVAKVEKGKSKKLKSVKELLGITIMERSSFEKNPIDFLEAKGYKEVKKDLIIKLPKYSLFELENGRKRMLASARELQKGNELALPSKYVNFLYLASHYEKLKGSPEDNEQKQLFVEQHKHYLDEIIEQISEFSKRVILADANLDKVLSAYNKHRDKPIREQAENIIHLFTLTNLGAPAAFKYFDTTIDRKQYRSTKEVLDATLIHQSITGLYETRIDLSQLGGD

SEQ ID NO: 375 - protein, 1367 aa, Artificial Sequence
  Synthetic
DKKYSIGLDIGTNSVGWAVITDEYKVPSKKFKVLGNTDRHSIKKNLIGALLFDSGETAEATRLKRTARRRYTRRKNRICYLQEIFSNEMAKVDDSFFHRLEESFLVEEDKKHERHPIFGNIVDEVAYHEKYPTIYHLRKKLVDSTDKADLRLIYLALAHMIKFRGHFLIEGDLNPDNSDVDKLFIQLVQTYNQLFEENPINASGVDAKAILSARLSKSRRLENLIAQLPGEKKNGLFGNLIALSLGLTPNFKSNFDLAEDAKLQLSKDTYDDDLDNLLAQIGDQYADLFLAAKNLSDAILLSDILRVNTEITKAPLSASMIKRYDEHHQDLTLLKALVRQQLPEKYKEIFFDQSKNGYAGYIDGGASQEEFYKFIKPILEKMDGTEELLVKLNREDLLRKQRTFDNGSIPHQIHLGELHAILRRQEDFYPFLKDNREKIEKILTFRIPYYVGPLARGNSRFAWMTRKSEETITPWNFEEVVDKGASAQSFIERMTNFDKNLPNEKVLPKHSLLYEYFTVYNELTKVKYVTEGMRKPAFLSGEQKKAIVDLLFKTNRKVTVKQLKEDYFKKIECFDSVEISGVEDRFNASLGTYHDLLKIIKDKDFLDNEENEDILEDIVLTLTLFEDREMIEERLKTYAHLFDDKVMKQLKRRRYTGWGRLSRKLINGIRDKQSGKTILDFLKSDGFANRNFMQLIHDDSLTFKEDIQKAQVSGQGDSLHEHIANLAGSPAIKKGILQTVKVVDELVKVMGRHKPENIVIEMARENQTTQKGQKNSRERMKRIEEGIKELGSQILKEHPVENTQLQNEKLYLYYLQNGRDMYVDQELDINRLSDYDVDAIVPQSFLKDDSIDNKVLTRSDKNRGKSDNVPSEEVVKKMKNYWRQLLNAKLITQRKFDNLTKAERGGLSELDKAGFIKRQLVETRQITKHVAQILDSRMNTKYDENDKLIREVKVITLKSKLVSDFRKDFQFYKVREINNYHHAHDAYLNAVVGTALIKKYPKLESEFVYGDYKVYDVRKMIAKSEQEIGKATAKYFFYSNIMNFFKTEITLANGEIRKRPLIETNGETGEIVWDKGRDFATVRKVLSMPQVNIVKKTEVQTGGFSKESILPKRNSDKLIARKKDWDPKKYGGFVSPTVAYSVLVVAKVEKGKSKKLKSVKELLGITIMERSSFEKNPIDFLEAKGYKEVKKDLIIKLPKYSLFELENGRKRMLASARELQKGNELALPSKYVNFLYLASHYEKLKGSPEDNEQKQLFVEQHKHYLDEIIEQISEFSKRVILADANLDKVLSAYNKHRDKPIREQAENIIHLFTLTNLGAPAAFKYFDTTIDRKEYRSTKEVLDATLIHQSITGLYETRIDLSQLGGD

SEQ ID NO: 376 - protein, 162 aa, Artificial Sequence
  Synthetic
MFERNYDPRELRKETYLLYEIKWGKSGKLWRHWCQNNRTQHAEVYFLENIFNARRFNPSTHCSITWYLSWSPCAECSQKIVDFLKEHPNVNLEIYVARLYYHEDERNRQGLRDLVNSGVTIRIMDLPDYNYCWKTFVSDQGGDEDYWPGHFAPWIKQYSLKL

SEQ ID NO: 377 - protein, 162 aa, Artificial Sequence
  Synthetic
MFERNYDPRELRKETYLLYEIKWGKSGKLWRHWCQNNRTQHAEVYFLENIFNARRFNPSTHCSITWYLSWSPCAECSQKIVDFLKEHPNVNLEIYVARLYYPENERNRQGLRDLVNSGVTIRIMDLPDYNYCWKTFVSDQGGDEDYWPGHFAPWIKQYSLKL

SEQ ID NO: 378 - protein, 229 aa, Artificial Sequence [sequence omitted]

SEQ ID NO: 379 - protein, 229 aa, Artificial Sequence
  Synthetic
MSSKTGPVAVDPTLRRRIEPHEFEVFFDPRELRKETCLLYEINWGGRHSIWRHTSQNTNKHVEVNFIEKFTTERYFCPNTRCSITWFLSWSPCGECSRAITEFLSRYPNVTLFIYIARLYHLANPRNRQGLRDLISSGVTIQIMTEQESGYCWHNFVNYSPSNESHWPRYPHLWVRLYVLELYCIILGLPPCLNILRRKQSQLTSFTIALQSCHYQRLPPHILWATGLK

SEQ ID NO: 380 - protein, 208 aa, Artificial Sequence; identical to SEQ ID NO: 40
  Synthetic

SEQ ID NO: 381 - protein, 208 aa, Artificial Sequence
  Synthetic
MTDAEYVRIHEKLDIYTFKKQFSNNKKSVSHRCYVLFELKRRGERRACFWGYAVNKPQSGTERGIHAEIFSIRKVEEYLRDNPGQFTINWYSSWSPCADCAEKILEWYNQELRGNGHTLKIWVCKLYYEKNARNQIGLWNLRDNGVGLNVMVSEHYQCCRKIFIQSSHNQLNENRWLEKTLKRAEKRRSELSIMFQVKILHTTKSPAV

SEQ ID NO: 382 - protein, 229 aa, Artificial Sequence
  Synthetic
MSSETGPVAVDPTLRRRIEPHEFEVFFDPRELRKETCLLYEIKWGTSHKIWRHSSKNTTKHVEVNFIEKFTSERHFCPSTSCSITWFLSWSPCGECSKAITEFLSQHPNVTLVIYVARLYHHMDQQNRQGLRDLVNSGVTIQIMTAPEYDYCWRNFVNYPPGKEAHWPRYPPLWMKLYALELHAGILGLPPCLNILRRKQPQLTFFTIALQSCHYQRLPPHILWATGLK

SEQ ID NO: 383 - protein, 229 aa, Artificial Sequence
  Synthetic
MSSKTGPVAVDPTLRRRIEPHEFEVFFDPRELRKETCLLYEIKWGTSHKIWRHSSKNTTKHVEVNFIEKFTSERHFCPSTSCSITWFLSWSPCGECSKAITEFLSQHPNVTLVIYVARLYHLMNQQNRQGLRDLVNSGVTIQIMTAPEYDYCWHNFVNYPPGKESHWPRYPPLWMKLYALELHAGILGLPPCLNILRRKQSQLTSFTIALQSCHYQRLPPHILWATGLK

SEQ ID NO: 384 - protein, 8 aa, Artificial Sequence
  Synthetic
VSRKRPRP

SEQ ID NO: 385 - protein, 9 aa, Artificial Sequence
  Synthetic
PAAKRVKLD

SEQ ID NO: 386 - protein, 9 aa, Artificial Sequence
  Synthetic
KLKIKRPVK

SEQ ID NO: 387 - protein, 10 aa, Artificial Sequence
  Synthetic
EGAPPAKRAR

SEQ ID NO: 388 - protein, 12 aa, Artificial Sequence
  Synthetic
PPQPKKKPLDGE

SEQ ID NO: 389 - protein, 19 aa, Artificial Sequence
  Synthetic
MKRTADGSEFESPKKKRKV

SEQ ID NO: 390 - protein, 20 aa, Artificial Sequence
  Synthetic
AVKRPAATKKAGQAKKKKLD

SEQ ID NO: 391 - protein, 21 aa, Artificial Sequence
  Synthetic
SGGSKRTADGSEFEPKKKRKV

SEQ ID NO: 392 - protein, 25 aa, Artificial Sequence
  Synthetic
MSRRRKANPTKLSENAKKLAKEVEN

SEQ ID NO: 393 - protein, 64 aa, Artificial Sequence
  Synthetic
SGGSSGGSSGSETPGTSESATPESSGGSSGGSSGGSSGGSSGSETPGTSESATPESSGGSSGGS

SEQ ID NO: 394 - protein, 40 aa, Artificial Sequence
  Synthetic
SGGSSGGSSGSETPGTSESATPESSGGSSGGSSGGSSGGS

SEQ ID NO: 395 - protein, 92 aa, Artificial Sequence
  Synthetic
PGSPAGSPTSTEEGTSESATPESGPGTSTEPSEGSAPGSPAGSPTSTEEGTSTEPSEGSAPGTSTEPSEGSAPGTSESATPESGPGSEPATS

SEQ ID NO: 396 - protein, 24 aa, Artificial Sequence
  Synthetic
  REPEAT (1)..(4): SGGS repeats
  REPEAT (21)..(24): SGGS repeats
SGGSSGSETPGTSESATPESSGGS

SEQ ID NO: 397 - protein, 4 aa, Artificial Sequence
  Synthetic
  REPEAT (1)..(4): GGGS repeats
GGGS

SEQ ID NO: 398 - protein, 5 aa, Artificial Sequence
  Synthetic
  REPEAT (1)..(5): GGGGS repeats
GGGGS

SEQ ID NO: 399 - protein, 1 aa, Artificial Sequence
  Synthetic
  REPEAT (1)..(1): G repeats
G

SEQ ID NO: 400 - protein, 2 aa, Artificial Sequence
  Synthetic
  REPEAT (1)..(2): XP repeats
XP

SEQ ID NO: 401 - protein, 104 aa, Artificial Sequence
  Synthetic
GGSGGSPGSPAGSPTSTEEGTSESATPESGPGTSTEPSEGSAPGSPAGSPTSTEEGTSTEPSEGSAPGTSTEPSEGSAPGTSESATPESGPGSEPATSGGSGGS

SEQ ID NO: 402 - protein, 36 aa, Artificial Sequence
  Synthetic
  SITE (2)..(2): Xaa can be any naturally occurring amino acid
  SITE (4)..(29): Xaa can be any naturally occurring amino acid
  SITE (27)..(29): may be absent
  SITE (32)..(35): Xaa can be any naturally occurring amino acid
  SITE (34)..(35): may be absent
HXEXXXXXXXXXXXXXXXXXXXXXXXXXXPCXXXXC

What is claimed is:

1. A fusion protein comprising: (i) a circularly permuted nucleic acid programmable DNA/RNA binding protein (napDNA/RNAbp); and (ii) a nucleic acid effector domain.

2. The fusion protein of claim 1, wherein the circularly permuted napDNA/RNAbp is a nuclease, a nickase, or is nuclease inactive.

3. The fusion protein of claim 1 or 2, wherein the circularly permuted napDNA/RNAbp is a circularly permuted Cas9, or a variant thereof, that is capable of binding DNA or RNA when complexed with a guide RNA (gRNA).

4. The fusion protein of any one of claims 1-3, wherein the circularly permuted napDNA/RNAbp is a circularly permuted nuclease active Cas9, a circularly permuted Cas9 nickase (Cas9n), a circularly permuted nuclease inactive Cas9 (Cas9d), or a variant thereof, that is capable of binding DNA or RNA when complexed with a guide RNA (gRNA).

5. The fusion protein of any one of claims 3-4, wherein the nucleic acid effector domain is closer in proximity to a single stranded DNA (ssDNA) loop that is formed in a double stranded DNA molecule when the gRNA complexed with the fusion protein binds to a strand of the double stranded DNA molecule, as compared to a fusion protein that has a corresponding non-circularly permuted Cas9, optionally wherein the corresponding non-circularly permuted Cas9 is a wild-type Cas9, or a variant thereof, that is capable of binding DNA when complexed with a guide RNA (gRNA).

6. The fusion protein of any one of claims 1-5, wherein the circularly permuted napDNA/RNAbp is a circularly permuted Cas9 that is circularly permuted at any one of amino acid residue numbers 1000 to 1350 of a Cas9, or a variant thereof, that is capable of binding DNA when complexed with a guide RNA (gRNA).

7. The fusion protein of any one of claims 1-6, wherein the circularly permuted napDNA/RNAbp is a circularly permuted Cas9 that is circularly permuted at any one of amino acid residue numbers 1000 to 1350 of S. pyogenes Cas9 (SpCas9) having the amino acid sequence SEQ ID NO: 1, or at any one of the corresponding amino acid residue numbers in another Cas9.

8. The fusion protein of any one of claims 1-7, wherein the circularly permuted napDNA/RNAbp is a circularly permuted Cas9 that is circularly permuted at any one of amino acid residue numbers 1012 to 1249 of a Cas9, or a variant thereof, that is capable of binding DNA when complexed with a guide RNA (gRNA).

9. The fusion protein of any one of claims 1-8, wherein the circularly permuted napDNA/RNAbp is a circularly permuted Cas9 that is circularly permuted at any one of amino acid residue numbers 1012 to 1249 of S. pyogenes Cas9 (SpCas9) having the amino acid sequence SEQ ID NO: 1, or at any one of the corresponding amino acid residue numbers in another Cas9.

10. The fusion protein of any one of claims 1-9, wherein the circularly permuted napDNA/RNAbp is a circularly permuted Cas9 that is circularly permuted at any one of amino acid residue numbers 1012, 1028, 1041, 1249, or 1300 of S. pyogenes Cas9 (SpCas9) having the amino acid sequence SEQ ID NO: 1, or at any one of the corresponding amino acid residue numbers in another Cas9.

11. The fusion protein of any one of claims 1-10, wherein the circularly permuted napDNA/RNAbp is a circularly permuted Cas9 derived from a S. pyogenes Cas9 (SpCas9), a S. aureus Cas9 (SaCas9), or a variant thereof, that is capable of binding DNA when complexed with a guide RNA (gRNA).

12. The fusion protein of claim 11, wherein the variant of the SpCas9 is SpCas9-VQR or SpCas9-VRER.

13. The fusion protein of claim 11, wherein the variant of the SaCas9 is SaCas9-KKH.

14. The fusion protein of any one of claims 1-13, wherein the circularly permuted napDNA/RNAbp is derived from a Cas9 comprising an amino acid sequence that is at least 80%, 85%, 90%, 95%, 98%, 99%, or 99% identical to SEQ ID NO: 1 or the amino acid sequence of a Cas9 having any one of the accession numbers WP_010922251.1; WP_010922251.1; AIT42264.1; AKQ21048.1; AKS40380.1; WP_011285506.1; WP_032462016.1; AKA60242.1; 4UN5_B; WP_020905136.1; WP_011284745.1; WP_038431314.1; WP_002989955.1; WP_011527619.1; WP_032464890.1; WP_030125963.1; WP_030126706.1; WP_032462936.1; WP_014407541.1; WP_038434062.1; WP_011054416.1; WP_031488318.1; WP_032460140.1; WP_032461047.1; WP_012560673.1; WP_038432938.1; WP_023080005.1; WP_023610282.1; WP_049519324.1; WP_048327215.1; WP_014612333.1; WP_015017095.1; WP_015057649.1; WP_012767106.1; WP_003043819.1; AII16583.1; AKE81011.1; AGZ01981.1; BAQ51233.1; and WP_033888930.1.

15. The fusion protein of any one of claims 1-14 wherein the circularly permuted napDNA/RNAbp is derived from a Cas9 comprising the amino acid sequence of SEQ ID NO: 1 or the amino acid sequence of a Cas9 having any one of the accession numbers WP_010922251.1; WP_010922251.1; AIT42264.1; AKQ21048.1; AKS40380.1; WP_011285506.1; WP_032462016.1; AKA60242.1; 4UN5_B; WP_020905136.1; WP_011284745.1; WP_038431314.1; WP_002989955.1; WP_011527619.1; WP_032464890.1; WP_030125963.1; WP_030126706.1; WP_032462936.1; WP_014407541.1; WP_038434062.1; WP_011054416.1; WP_031488318.1; WP_032460140.1; WP_032461047.1; WP_012560673.1; WP_038432938.1; WP_023080005.1; WP_023610282.1; WP_049519324.1; WP_048327215.1; WP_014612333.1; WP_015017095.1; WP_015057649.1; WP_012767106.1; WP_003043819.1; A1116583.1; AKE81011.1; AGZ01981.1; BAQ51233.1; and WP_033888930.1.

16. The fusion protein of any one of claims 1-15, wherein the circularly permuted napDNA/RNAbp comprises an amino acid sequence that is at least 80%, 85%, 90%, 95%, 98%, 99%, or 99% identical to any one of SEQ ID NOs: 295-299.

17. The fusion protein of any one of claims 1-16 wherein the circularly permuted napDNA/RNAbp comprises the amino acid sequence of any one of SEQ ID NOs: 295-299.

18. The fusion protein of any one of claims 1-17, wherein the nucleic acid effector domain is a deaminase domain.

19. The fusion protein of claim 18, wherein the deaminase domain is a cytidine deaminase domain.

20. The fusion protein of claim 19, wherein the cytidine deaminase is a deaminase from the apolipoprotein B mRNA-editing complex (APOBEC) family deaminase.

21. The fusion protein of claim 19 or 20, wherein the cytidine deaminase comprises an amino acid sequence that is at least 80%, 85%, 90%, 95%, 98%, or 99% identical to the amino acid sequence of:
(SEQ ID NO: 117)
SSETGPVAVDPTLRRRIEPHEFEVFFDPRELRKETCLLYEINWGGRHS
IWRHTSQNTNKHVEVNFIEKFTTERYFCPNTRCSITWFLSWSPCGECS
RAITEFLSRYPHVTLFIYIARLYHHADPRNRQGLRDLISSGVTIQIMT
EQESGYCWRNFVNYSPSNEAHWPRYPHLWVRLYVLELYCIILGLPPCL
NILRRKQPQLTFFTIALQSCHYQRLPPHILWATGLK.

22. The fusion protein of any one of claims 19-21, wherein the cytidine deaminase domain comprises an amino acid sequence:
(SEQ ID NO: 117)
SSETGPVAVDPTLRRRIEPHEFEVFFDPRELRKETCLLYEINWGGRHS
IWRHTSQNTNKHVEVNFIEKFTTERYFCPNTRCSITWFLSWSPCGECS
RAITEFLSRYPHVTLFIYIARLYHHADPRNRQGLRDLISSGVTIQIMT
EQESGYCWRNFVNYSPSNEAHWPRYPHLWVRLYVLELYCIILGLPPCL
NILRRKQPQLTFFTIALQSCHYQRLPPHILWATGLK.

23. The fusion protein of claim 19 or 20, wherein the cytidine deaminase domain comprises an amino acid sequence that is at least 80%, 85%, 90%, 95%, 98%, or 99% identical to the amino acid sequence of an one of SEQ ID NOs: 9-43, or 117.

24. The fusion protein of claim 19 or 20, wherein the cytidine deaminase domain comprises the amino acid sequence of any one of SEQ ID NOs: 9-43, or 117.

25. The fusion protein of any one of claims 18-24, wherein the fusion protein further comprises one or more UGI domains.

26. The fusion protein of any one of claims 18-25, wherein the fusion protein comprises two UGI domains.

27. The fusion protein of claim 25 or 26, wherein the one or more UGI domains comprise an amino acid sequence that is at least 80%, 85%, 90%, 95%, 98%, or 99% identical to the amino acid sequence of
(SEQ ID NO: 118)
TNLSDIIEKETGKQLVIQESILMLPEEVEEVIGNKPESDILVHTAYDE
STDENVMLLTSDAPEYKPWALVIQDSNGENKIKML.

28. The fusion protein of claim 25 or 26, wherein the one or more UGI domains comprise the amino acid sequence of SEQ ID NO: 118.

29. The fusion protein of any one of claims 18-28 further comprising one or more nuclear localization sequences.

30. The fusion protein of claim 29, wherein at least one of the one or more nuclear localization sequences is a bipartite nuclear localization sequence.

31. The fusion protein of claim 29 or 30, wherein one or more of the nuclear localization sequences comprises the amino acid sequence KRTADGSEFESPKKKRKV (SEQ ID NO: 84) or KRTADGSEFEPKKKRKV (SEQ ID NO: 85).

32. The fusion protein of any one of claims 18-31, wherein the fusion protein comprises the structure: NH₂-[first nuclear localization sequence]-[cytidine deaminase domain]-[circularly permuted napDNA/RNAbp]-[first UGI domain]-[second UGI domain]-[second nuclear localization sequence]-COOH, wherein each instance of “-” comprises an optional linker.

33. The fusion protein of claim 32, wherein the cytidine deaminase domain and the circularly permuted napDNA/RNAbp are linked via a linker comprising the amino acid sequence SGGSSGGSSGSETPGTSESATPESSGGSSGGS (SEQ ID NO: 113); the circularly permuted napDNA/RNAbp and the first UGI domain are linked via a linker comprising the amino acid sequence of SGGSGGSGGS (SEQ ID NO: 114); the first UGI domain and the second UGI domain are linked via a linker comprising the amino acid sequence of SGGSGGSGGS (SEQ ID NO: 114); and/or the second UGI domain and the second nuclear localization sequence are linked via a linker comprising the amino acid sequence of SGGS (SEQ ID NO: 115).

34. The fusion protein of any one of claims 18-33, wherein the fusion protein comprises an amino acid sequence that is at least 80%, 85%, 90%, 95%, 98%, or 99% identical to the amino acid sequence of SEQ ID NO: 72, 73, 74, 75 or 76.

35. The fusion protein of any one of claims 18-34, wherein the fusion protein comprises the amino acid sequence of SEQ ID NO: 72, 73, 74, 75 or 76.

36. The fusion protein of claim 18, wherein the nucleic acid effector domain comprises a first adenosine deaminase.

37. The fusion protein of claim 36, wherein the first adenosine deaminase is capable of deaminating adenine in deoxyribonucleic acid (DNA).

38. The fusion protein of claim 36 or 37, wherein the first adenosine deaminase is a TadA adenosine deaminase.

39. The fusion protein of any one of claims 36-38, wherein the first adenosine deaminase comprises an amino acid sequence that is at least 80%, 85%, 90%, 95%, 98%, or 99% identical to the amino acid sequence of any one of SEQ ID NOs: 44.

40. The fusion protein of any one of claims 36-39, wherein the first adenosine deaminase comprises an amino acid sequence that is at least 90% identical to any one of the amino acid sequences of SEQ ID NOs: 44-65 with the exception of one or more substitutions at positions selected from the group consisting of amino acid residues corresponding to positions 8, 17, 18, 23, 34, 36, 45, 48, 51, 56, 59, 84, 85, 94, 95, 102, 104, 106, 107, 108, 110, 118, 123, 127, 138, 142, 146, 147, 149, 151, 152, 153, 154, 155, 156, and 157 of the amino acid sequence of SEQ ID NO: 44, wherein said first adenosine deaminase deaminates adenine in deoxyribonucleic acid (DNA).

41. The fusion protein of any one of claims 36-40, wherein the first adenosine deaminase comprises the amino acid sequence of SEQ ID NO: 44 with the exception of the one or more substitutions at positions selected from the group consisting of amino acid residues corresponding to positions 8, 17, 18, 23, 34, 36, 45, 48, 51, 56, 59, 84, 85, 94, 95, 102, 104, 106, 107, 108, 110, 118, 123, 127, 138, 142, 146, 147, 149, 151, 152, 153, 154, 155, 156, and 157 of the amino acid sequence of SEQ ID NO: 44.

42. The fusion protein of claim 41, wherein said one or more substitutions are at positions selected from the group consisting of amino acid residues corresponding to positions 23, 36, 48, 51, 84, 106, 108, 123, 142, 146, 147, 152, 155, 156, and 157 of the amino acid sequence of SEQ ID NO: 44.

43. The fusion protein of claim 42, wherein said one or more substitutions are substitutions selected from the group consisting of W23R, W23L, H₃₆L, P48S, P48A, R51L, L84F, A106V, D108N, H₁₂₃Y, A142N, S146C, D147Y, R152P, E155V, I156F, and K157N of the amino acid sequence of SEQ ID NO: 44.

44. The fusion protein of claim 42, wherein said one or more substitutions comprise a group of substitutions at positions selected from the group of substitutions at positions consisting of:
(i) W23, H₃₆, P48, R51, L84, A106, D108, H₁₂₃, A142, S146, D147, R152, E155, 1156, and K157;
(ii) W23, H₃₆, P48, R51, L84, A106, D108, H₁₂₃, S146, D147, R152, E155, 1156, and K157;
(iii) H₃₆, P48, R51, L84, A106, D108, H₁₂₃, A142, S146, D147, E155, 1156, and K157;
(iv) H₃₆, P48, R51, L84, A106, D108, H₁₂₃, S146, D147, E155, 1156, and K157;
(v) H₃₆, R51, L84, A106, D108, H₁₂₃, S146, D147, E155, 1156, and K157;
(vi) L84, A106, D108, H₁₂₃, D147, E155, and 1156;
(vii) A106, D108, D147, and E155;
(viii) A106, and D108; and
(ix) D108; of the amino acid sequence of SEQ ID NO: 44.

45. The fusion protein of claim 42, wherein said one or more substitutions comprise a group of substitutions selected from the groups of substitutions consisting of:
(i) W23L, H₃₆L, P48A, R51L, L84F, A106V, D108N, H₁₂₃Y, A142N, S146C, D147Y, R152P, E155V, I156F, and K157N;
(ii) W23R, H₃₆L, P48A, R51L, L84F, A106V, D108N, H₁₂₃Y, S146C, D147Y, R152P, E155V, I156F, and K157N;
(iii) H₃₆L, P48S, R51L, L84F, A106V, D108N, H₁₂₃Y, A142N, S146C, D147Y, E155V, I156F, and K157N;
(iv) H₃₆L, P48S, R51L, L84F, A106V, D108N, H₁₂₃Y, S146C, D147Y, E155V, I156F, and K157N;
(v) H₃₆L, R51L, L84F, A106V, D108N, H₁₂₃Y, S146C, D147Y, E155V, I156F, and K157N;
(vi) L84F, A106V, D108N, H₁₂₃Y, D147Y, E155V, and I156F;
(vii) A106V, D108N, D147Y, and E155V;
(viii) A106V, and D108N; and
(ix) D108N; of the amino acid sequence of SEQ ID NO: 44.

46. The fusion protein of any one of claims 36-45 further comprising a second adenosine deaminase.

47. The fusion protein of claim 46, wherein said second adenosine deaminase is a TadA adenosine deaminase.

48. The fusion protein of claim 47, wherein said second adenosine deaminase comprises an amino acid sequence that is at least 90% identical to the amino acid sequence:
(SEQ ID NO: 44)
MSEVEFSHEYWMRHALTLAKRAWDEREVPVGAVLVHNNRVIGEGWNRP
IGRHDPTAHAEIMALRQGGLVMQNYRLIDATLYVTLEPCVMCAGAMIH
SRIGRVVFGARDAKTGAAGSLMDVLHHPGMNHRVEITEGILADECAAL
LSDFFRMRRQEIKAQKKAQSSTD.

49. The fusion protein of claim 48, wherein said second adenosine deaminase comprises the amino acid sequence of SEQ ID NO: 44.

50. The fusion protein of any one of claims 36-49, wherein the first adenosine deaminase comprises the amino acid sequence of SEQ ID NO: 44 with the exception of one or more substitutions selected from the group consisting of W23R, H₃₆L, P48A, R51L, L84F, A106V, D108N, H₁₂₃Y, S146C, D147Y, R152P, E155V, I156F, and K157N of the amino acid sequence of SEQ ID NO: 44.

51. The fusion protein of any one of claims 36-50, wherein the first adenosine deaminase comprises the amino acid sequence:
(SEQ ID NO: 119)
SEVEFSHEYWMRHALTLAKRARDEREVPVGAVLVLNNRVIGEGWNRAI
GLHDPTAHAEIMALRQGGLVMQNYRLIDATLYVTFEPCVMCAGAMIHS
RIGRVVFGVRNAKTGAAGSLMDVLHYPGMNHRVEITEGILADECAALL
CYFFRMPRQVFNAQKKAQSSTD.

52. The fusion protein of any one of claims 36-51 further comprising one or more nuclear localization sequences.

53. The fusion protein of claim 52, wherein at least one of the one or more nuclear localization sequences is a bipartite nuclear localization sequence.

54. The fusion protein of claim 52 or 53, wherein one or more of the nuclear localization sequences comprises the amino acid sequence KRTADGSEFESPKKKRKV (SEQ ID NO: 84) or KRTADGSEFEPKKKRKV (SEQ ID NO: 85).

55. The fusion protein of any one of claims 36-54, wherein the fusion protein comprises the structure: NH₂-[first nuclear localization sequence]-[first adenosine deaminase]-[second adenosine deaminase]-[circularly permuted napDNA/RNAbp]-[second nuclear localization sequence]-COOH, wherein each instance of “-” comprises an optional linker.

56. The fusion protein of claim 55, wherein the first adenosine deaminase and the second adenosine deaminase are linked via a linker comprising the amino acid sequence of SGGSSGGSSGSETPGTSESATPESSGGSSGGS (SEQ ID NO: 113); and the second adenosine deaminase and Cas9 domain are linked via a linker comprising the amino acid sequence of SEQ ID NO: SGGSSGGSSGSETPGTSESATPESSGGSSGGS (SEQ ID NO: 113).

57. The fusion protein of any one of claims 36-56, wherein the fusion protein comprises an amino acid sequence that is at least 80%, 85%, 90%, 95%, 98%, or 99% identical to the amino acid sequence of any one of SEQ ID NOs: 77-81.

58. The fusion protein of any one of claims 36-57, wherein the fusion protein comprises the amino acid sequence of any one of SEQ ID NOs: 77-81.

59. A nucleic acid sequence that encodes the fusion protein of any one of claims 1-58.

60. A vector comprising the nucleic acid of claim 51.

61. The vector of claim 60, wherein the vector comprises a heterologous promoter driving expression of the nucleic acid.

62. A complex comprising the fusion protein of any one of claims 1-58 and an RNA bound to the circularly permuted napDNA/RNAbp.

63. The complex of claim 62, wherein the RNA is a guide RNA (gRNA).

64. The complex of claim 62 or 63, wherein the RNA is a single guide RNA (sgRNA).

65. The complex of claim 64, wherein the gRNA comprises the backbone sequence of
SEQ ID NO: 120
5′-GUUUUAGAGCUAGAAAUAGCAAGUUAAAAUAAGGCUAGUCCGU-
3′.

66. The complex of any one of claims 62-65, wherein the RNA is from 10-100 nucleotides long and comprises a sequence of at least 10 contiguous nucleotides that is complementary to a target sequence.

67. The complex of any one of claims 62-66, wherein the RNA comprises a sequence of 10, 11, 12, 13, 14, 15, 16, 17, 18, 19, 20, 21, 22, 23, 24, 25, 26, 27, 28, 29, 30, 31, 32, 33, 34, 35, 36, 37, 38, 39, or 40 contiguous nucleotides that is complementary to a target sequence.

68. The complex of any one of claims 66-67, wherein the target sequence is a DNA sequence.

69. The complex of claim 67 or 68, wherein the target is in the genome of an organism.

70. The complex of claim 69, wherein the organism is a prokaryote.

71. The complex of claim 69, wherein the organism is a eukaryote.

72. The complex of claim 71, wherein the organism is a vertebrate.

73. The complex of claim 72, wherein the vertebrate is a mammal.

74. The complex of claim 73, wherein the mammal is a human.

75. A cell comprising the fusion protein of any one of claims 1-58.

76. A cell comprising the nucleic acid of claim 59.

77. A cell comprising the vector of claim 60 or 61.

78. A cell comprising the complex of any one of claims 62-74.

79. A method comprising contacting a nucleic acid molecule with the complex of any one of claims 62-74.

80. The method of claim 79, wherein the nucleic acid is DNA.

81. The method of claim 80, wherein the nucleic acid is double-stranded DNA.

82. The method of any one of claims 79-81, wherein the nucleic acid comprises a target sequence associated with a disease or disorder.

83. The method of claim 82, wherein the target sequence comprises a point mutation associated with a disease or disorder.

84. The method of any one of claims 82-83, wherein the target sequence comprises a T to C point mutation associated with a disease or disorder, and the deamination of the mutant C base results in a sequence that is not associated with a disease or disorder.

85. The method of any one of claims 82-83, wherein the target sequence comprises a G to A point mutation associated with a disease or disorder, and wherein the deamination of the mutant A base results in a sequence that is not associated with a disease or disorder.

86. The method of claim 84 or 85, wherein the target sequence encodes a protein, and the point mutation is in a codon and results in a change in the amino acid encoded by the mutant codon as compared to a wild-type codon.

87. The method of claim 84 or 85, wherein the target sequence is at a splice site, and the point mutation results in a change in the splicing of an mRNA transcript as compared to a wild-type transcript.

88. The method of claim 84 or 85, wherein the target sequence is in a promoter of a gene, and the point mutation results in increased expression of the gene.

89. The method of claim 84 or 85, wherein the target sequence is in a promoter of a gene, and the point mutation results in decreased expression of the gene.

90. The method of any one of claims 84-86, wherein the deamination of the mutant C or the mutant A results in a change of the amino acid encoded by the mutant codon.

91. The method of any one of claims 84-86, wherein the deamination of the mutant C or the mutant A results in the codon encoding a wild-type amino acid.

92. The method of claim 87, wherein the deamination of the mutant C or the mutant A results in a change of the mRNA transcript.

93. The method of claim 87, wherein the deamination of the mutant C or the mutant A results in a wild-type mRNA transcript.

94. The method of claim 88, wherein the deamination of the mutant C or the mutant A results in increased expression of the gene.

95. The method of claim 89, wherein the deamination of the mutant C or the mutant A results in decreased expression of the gene.

96. The method of any one of claims 79-95, wherein the contacting is performed in vitro.

97. The method of any one of claims 79-95, wherein the contacting is performed in vivo in a subject.

98. The method of claim 97, wherein the subject has been diagnosed with a disease or disorder.

99. A method of modifying one or more nucleotides within a protospacer sequence, the method comprising:
(i) contacting a double stranded DNA molecule with a base editor, wherein the base editor is bound to a guide RNA, thereby generating a portion of single-stranded DNA that comprises the protospacer sequence, wherein the base editor comprises a circularly permuted nucleic acid programmable binding protein (napDNA/RNAbp); and
(ii) modifying one or more nucleotides within the protospacer sequence.

100. The method of claim 99, wherein the base editor modifies one or more nucleotides within a window of 10 nucleotides of the protospacer sequence.

101. The method of claim 99 or 100, wherein the base editor modifies one or more nucleotides within a window of 8 nucleotides of the protospacer sequence.

102. The method of any one of claims 99-101, wherein the base editor modifies one or more nucleotides from positions 4-11 of the protospacer sequence.

103. The method of any one of claims 99-102, wherein the base editor modifies one or more nucleotides at positions 4, 5, 6, 7, 8, 9, 10, and/or 11 of the protospacer sequence.

104. The method of any one of claims 99-103, wherein the protospacer sequence is 5, 6, 7, 8, 9, 10, 11, 12, 13, 14, 15, 16, 17, 18, 19, 20, 21, 22, 23, 24, 25, 26, 27, 28, 29, or 30 nucleotides in length.

105. The method of any one of claims 99-104, wherein 1, 2, 3, 4, 5, 6, 7, or 8 nucleotides of the protospacer sequence are modified.

106. The method of any one of claims 99-105, wherein only one nucleotide of the protospacer sequence is modified.

107. The method of any one of claims 99-106, wherein the base editor comprises the fusion protein of any one of claims 1-58.

108. The method of any one of claims 99-107, wherein the double stranded DNA molecule comprises a protospacer-adjacent motif (PAM) that comprises the sequence NGG, NGA, NGCG, NNGRRT, or NNNRRT.

109. A method of modifying one or more nucleotides outside of a protospacer sequence, the method comprising:
(i) contacting a double stranded DNA molecule with a base editor, wherein the base editor is bound to a guide RNA, thereby generating a portion of single-stranded DNA that comprises the protospacer sequence, wherein the base editor comprises a circularly permuted nucleic acid programmable binding protein (napDNA/RNAbp); and
(ii) modifying one or more nucleotides outside of the protospacer sequence.

110. The method of claim 109, wherein step (ii) comprises modifying one or more nucleotides upstream of the protospacer sequence.

111. The method of claim 110, wherein step (ii) comprises modifying one or more nucleotides from 1 to 15 nucleotides upstream of the protospacer sequence.

112. The method of any one of claims 109-111, wherein one or more nucleotides upstream of the protospacer on the protospacer strand are modified.

113. The method of any one of claims 109-111, wherein one or more nucleotides upstream of the protospacer on the non-protospacer strand are modified.

114. The method of any one of claims 109-113, wherein 1, 2, 3, 4, 5, 6, 7, 8, 9, or 10 nucleotides outside of the protospacer sequence are modified.

115. The method of any one of claims 109-114, wherein only one nucleotide outside of the protospacer sequence is modified.

116. The method of any one of claims 109-115, wherein the base editor comprises the fusion protein of any one of claims 1-58.

117. The method of any one of claims 109-116, wherein the double stranded DNA molecule comprises a protospacer-adjacent motif (PAM) that comprises the sequence NGG, NGA, NGCG, NNGRRT, or NNNRRT.

118. The method of any one of claims 79-115, wherein the method results in less than 5%, less than 4%, less than 3%, less than 2%, less than 1%, or less than 0.5% byproducts.

119. The method of claim 118, wherein the byproducts comprise off-target mutations.

120. The method of claim 118, wherein the byproducts comprise unintended mutations.

121. The method of claim 120, wherein the unintended mutations are selected from the group consisting of a C to G mutation, a C to A mutation, an A to C mutation, or an A to T mutation.

122. The method of any one of claims 79-121, wherein the method results in less than 5%, less than 4%, less than 3%, less than 2%, less than 1%, or less than 0.5% indels.

123. A pharmaceutical composition comprising the fusion protein of any one of claims 1-58.

124. A pharmaceutical composition comprising the complex of any one of claims 62-74.

125. A pharmaceutical composition comprising the nucleic acid of claim 59.

126. A pharmaceutical composition comprising the vector of claim 60 or 61.

127. The pharmaceutical composition of any one of claims 123-126, further comprising a pharmaceutically acceptable excipient.

128. The pharmaceutical composition of any one of claims 123-127, further comprising a lipid.

129. The pharmaceutical composition of claim 128, wherein the lipid is a cationic lipid.

130. The pharmaceutical composition of claim 129, wherein the cationic lipid is DOTAP.

131. A circularly permuted nucleic acid programmable DNA/RNA binding protein (napDNA/RNAbp).

132. The circularly permuted napDNA/RNAbp of claim 131, wherein the circularly permuted napDNA/RNAbp is a nuclease, a nickase, or is nuclease inactive.

133. The circularly permuted napDNA/RNAbp of claim 131 or 132, wherein the circularly permuted napDNA/RNAbp is a circularly permuted Cas9, or a variant thereof, that is capable of binding DNA or RNA when complexed with a guide RNA (gRNA).

134. The circularly permuted napDNA/RNAbp of any one of claims 131-133, wherein the circularly permuted napDNA/RNAbp is a circularly permuted nuclease active Cas9, a circularly permuted Cas9 nickase (Cas9n), a circularly permuted nuclease inactive Cas9 (Cas9d), or a variant thereof, that is capable of binding DNA or RNA when complexed with a guide RNA (gRNA).

135. The circularly permuted napDNA/RNAbp of any one of claims 133-134, wherein the N-terminus of the circularly permuted Cas9 is closer in proximity to a single stranded DNA (ssDNA) loop that is formed in a double stranded DNA molecule when the gRNA complexed with the circularly permuted Cas9 binds to a strand of the double stranded DNA molecule, as compared to a corresponding non-circularly permuted Cas9, optionally wherein the corresponding non-circularly permuted Cas9 is a wild-type Cas9, or a variant thereof, that is capable of binding DNA when complexed with a guide RNA (gRNA).

136. The circularly permuted napDNA/RNAbp of any one of claims 131-135, wherein the circularly permuted napDNA/RNAbp is a circularly permuted Cas9 that is circularly permuted at any one of amino acid residue numbers 1000 to 1350 of a Cas9, or a variant thereof, that is capable of binding DNA when complexed with a guide RNA (gRNA).

137. The circularly permuted napDNA/RNAbp of any one of claims 131-136, wherein the circularly permuted napDNA/RNAbp is a circularly permuted Cas9 that is circularly permuted at any one of amino acid residue numbers 1000 to 1350 of S. pyogenes Cas9 (SpCas9) having the amino acid sequence SEQ ID NO: 1, or at any one of the corresponding amino acid residue numbers in another Cas9.

138. The circularly permuted napDNA/RNAbp of any one of claims 131-137, wherein the circularly permuted napDNA/RNAbp is a circularly permuted Cas9 that is circularly permuted at any one of amino acid residue numbers 1012 to 1249 of a Cas9, or a variant thereof, that is capable of binding DNA when complexed with a guide RNA (gRNA).

139. The circularly permuted napDNA/RNAbp of any one of claims 131-138, wherein the circularly permuted napDNA/RNAbp is a circularly permuted Cas9 that is circularly permuted at any one of amino acid residue numbers 1012 to 1249 of S. pyogenes Cas9 (SpCas9) having the amino acid sequence SEQ ID NO: 1, or at any one of the corresponding amino acid residue numbers in another Cas9.

140. The circularly permuted napDNA/RNAbp of any one of claims 131-139, wherein the circularly permuted napDNA/RNAbp is a circularly permuted Cas9 that is circularly permuted at any one of amino acid residue numbers 1012, 1028, 1041, 1249, or 1300 of S. pyogenes Cas9 (SpCas9) having the amino acid sequence SEQ ID NO: 1, or at any one of the corresponding amino acid residue numbers in another Cas9.

141. The circularly permuted napDNA/RNAbp of any one of claims 131-140, wherein the circularly permuted napDNA/RNAbp is a circularly permuted Cas9 derived from a S. pyogenes Cas9 (SpCas9), a S. aureus Cas9 (SaCas9), or a variant thereof, that is capable of binding DNA when complexed with a guide RNA (gRNA).

142. The circularly permuted napDNA/RNAbp of claim 141, wherein the variant of the SpCas9 is SpCas9-VQR or SpCas9-VRER.

143. The circularly permuted napDNA/RNAbp of claim 141, wherein the variant of the SaCas9 is SaCas9-KKH.

144. The circularly permuted napDNA/RNAbp of any one of claims 131-143, wherein the circularly permuted napDNA/RNAbp is derived from a Cas9 comprising an amino acid sequence that is at least 80%, 85%, 90%, 95%, 98%, 99%, or 99% identical to SEQ ID NO: 1 or the amino acid sequence of a Cas9 having any one of the accession numbers WP_010922251.1; WP_010922251.1; AIT42264.1; AKQ21048.1; AKS40380.1; WP_011285506.1; WP_032462016.1; AKA60242.1; 4UN5_B; WP_020905136.1; WP_011284745.1; WP_038431314.1; WP_002989955.1; WP_011527619.1; WP_032464890.1; WP_030125963.1; WP_030126706.1; WP_032462936.1; WP_014407541.1; WP_038434062.1; WP_011054416.1; WP_031488318.1; WP_032460140.1; WP_032461047.1; WP_012560673.1; WP_038432938.1; WP_023080005.1; WP_023610282.1; WP_049519324.1; WP_048327215.1; WP_014612333.1; WP_015017095.1; WP_015057649.1; WP_012767106.1; WP_003043819.1; A1116583.1; AKE81011.1; AGZ01981.1; BAQ51233.1; and WP_033888930.1.

145. The circularly permuted napDNA/RNAbp of any one of claims 131-144 wherein the circularly permuted napDNA/RNAbp is derived from a Cas9 comprising the amino acid sequence of SEQ ID NO: 1 or the amino acid sequence of a Cas9 having any one of the accession numbers WP_010922251.1; WP_010922251.1; AIT42264.1; AKQ21048.1; AKS40380.1; WP_011285506.1; WP_032462016.1; AKA60242.1; 4UN5_B; WP_020905136.1; WP_011284745.1; WP_038431314.1; WP_002989955.1; WP_011527619.1; WP_032464890.1; WP_030125963.1; WP_030126706.1; WP_032462936.1; WP_014407541.1; WP_038434062.1; WP_011054416.1; WP_031488318.1; WP_032460140.1; WP_032461047.1; WP_012560673.1; WP_038432938.1; WP_023080005.1; WP_023610282.1; WP_049519324.1; WP_048327215.1; WP_014612333.1; WP_015017095.1; WP_015057649.1; WP_012767106.1; WP_003043819.1; A1116583.1; AKE81011.1; AGZ01981.1; BAQ51233.1; and WP_033888930.1.

146. The circularly permuted napDNA/RNAbp of any one of claims 131-145, wherein the circularly permuted napDNA/RNAbp comprises an amino acid sequence that is at least 80%, 85%, 90%, 95%, 98%, 99%, or 99% identical to any one of SEQ ID NOs: 295-299.

147. The circularly permuted napDNA/RNAbp of any one of claims 131-146 wherein the circularly permuted napDNA/RNAbp comprises the amino acid sequence of any one of SEQ ID NOs: 295-299.

148. A kit comprising a nucleic acid construct, comprising
(a) a nucleic acid sequence encoding the fusion protein of any one of claims 1-58; and
(b) a heterologous promoter that drives expression of the sequence of (a).

149. A kit comprising a nucleic acid construct, comprising
(a) a nucleic acid sequence encoding the The circularly permuted napDNA/RNAbp of any one of claims 131-147; and
(b) a heterologous promoter that drives expression of the sequence of (a).

150. The kit of claim 148 or 149, wherein the nucleic acid construct further comprises
(c) a cloning site positioned to allow the cloning of a nucleic acid sequence identical or complementary to a target sequence into a guide RNA backbone.

151. The kit of claim 150, comprising a second heterologous promoter that drives expression of the guide RNA backbone of (c).

152. The kit of any one of claims 141-151, further comprising an expression construct encoding a guide RNA backbone, wherein the construct comprises a cloning site positioned to allow the cloning of a nucleic acid sequence identical or complementary to a target sequence into the guide RNA backbone.
